(19) United States
(12) Patent Application Publication
(10) Pub. No.: US 2025/0297255 A1
(43) Pub. Date: Sep. 25, 2025

(54) SYSTEMS TARGETING TMPRSS4 AND SLC34A2

(71) Applicants: Arsenal Biosciences, Inc., South San Francisco, CA (US); Juno Therapeutics, Inc., Seattle, WA (US)

(72) Inventors: Jasper Williams, San Francisco, CA (US); Michelle Nguyen, San Francisco, CA (US); Rona Harari Steinfeld, Sunnyvale, CA (US); Jianying Liu, Albany, CA (US); Matthew Drever, Concord, CA (US); Samuel A. Williams, Burlingame, CA (US); Stephanie Elise Busch, Seattle, WA (US); Pallavur V. Sivakumar, Seattle, WA (US); Gabriela Hernandez-Hoyos, Seattle, WA (US); Brian Andrew Fox, Seattle, WA (US); Cédric Cleyrat, Seattle, WA (US); Christopher Mark Hill, Seattle, WA (US); Lore K. Florin, Redwood City, CA (US); Nels B. Hamacher, Mountlake Terrace, WA (US); Craig Darwin Ostrander, Bothell, WA (US); Sergio L. Lacayo, Castro Valley, CA (US)

(21) Appl. No.: 19/085,815

(22) Filed: Mar. 20, 2025

Related U.S. Application Data
(60) Provisional application No. 63/567,860, filed on Mar. 20, 2024.
(60) Provisional application No. 63/771,558, filed on Mar. 13, 2025.

(51) Int. Cl. C12N 15/113; A61K 40/10; A61P 35/00; C07K 16/00; C12N 5/07

(52) U.S. Cl. CPC C12N 15/113; A61K 40/10; A61P 35/00; C07K 16/00; C12N 5/06; C07K 2317/24; C07K 2317/565; C12N 2510/00; C12N 2730/10011

(57) ABSTRACT

Provided herein are polypeptides, nucleic acids, and cells comprising antigen-binding domains that specifically bind to Solute Carrier Family 34 Member 2 (SLC34A2) or Transmembrane protease, serine 4 (TMPRSS4), and methods of use thereof. Also provided are polypeptides, systems, nucleic acids, and cells comprising priming receptors comprising an antigen-binding domain that specifically binds Solute Carrier Family 34 Member 2 (SLC34A2) and chimeric antigen receptors (CAR) comprising an antigen-binding domain that specifically binds to Transmembrane protease, serine 4 (TMPRSS4).

### CROSS-REFERENCE TO RELATED APPLICATIONS

[0001] This application claims the benefit of U.S. Provisional Application No. 63/567,860, filed Mar. 20, 2024, and U.S. Provisional Application No. 63/771,558, filed Mar. 13, 2025, both which are hereby incorporated in their entirety by reference.

### SEQUENCE LISTING

[0002] The instant application contains a Sequence Listing XML which has been submitted electronically and is hereby incorporated by reference in its entirety. Said XML copy, created on Mar. 13, 2025, is named ANB-501US_SL.xml, and is 1,393,781 bytes in size.

### BACKGROUND

[0003] TMPRSS4, is a 48 kDa transmembrane glycoprotein that belongs to the serine protease family of proteins, a promoter of cancer cell invasion. The canonical isoform encodes a type II single pass transmembrane protein with a 384 amino acid extracellular C-terminal domain. An autocatalytic event has been reported to induce self-cleavage between amino acids 204 and 205, resulting in a 150 amino acid extracellular domain. Elevated expression of TMPRSS4 correlates with poor prognosis in colorectal cancer, gastric cancer, prostate cancer, non-small cell lung cancer, and other cancers. Therefore, cancer immunotherapy using T cells redirected with TMPRSS4 receptor may show antitumor functions.

[0004] Cancer is a disease characterized by uncontrollable growth of cells. Many approaches to treating cancer have been tried, including drugs and radiation therapies. Recent cancer treatments have sought to use the body's own immune cells to attack cancer cells. One promising approach uses T cells that are taken from a patient and genetically engineered to produce chimeric antigen receptors, or CARs, receptor proteins that give the T cells a new ability to target a specific protein. The receptors are chimeric because they combine antigen-binding and T-cell activating functions into a single receptor. Immunotherapy using CAR-T cells is promising because the modified T cells have the potential to recognize cancer cells in order to more effectively target and destroy them.

[0005] However, there remain some concerns and limitations to CAR T cell-based immunotherapy. Some CAR T cells may engage with normal cells expressing low levels of target antigens, leading to leading to on-target, off tumor toxicity. Thus, additional therapies that reduce off-tumor toxicity remain desirable.

### SUMMARY

[0006] In one aspect, provided herein are systems comprising:
[0007] a. a first chimeric polypeptide comprising a priming receptor comprising a first antigen-binding domain that specifically binds Solute Carrier Family 34 Member 2 (SLC34A2) (SEQ ID NO: 962); and
[0008] b. a second chimeric polypeptide comprising a chimeric antigen receptor (CAR) comprising a second antigen-binding domain that specifically binds to Transmembrane protease, serine 4 (TMPRSS4) (SEQ ID NO: 960).

[0009] In some embodiments, the first antigen-binding domain comprises a first variable heavy (VH) chain sequence comprising three heavy chain CDR sequences, CDR-H1, CDR-H2, and CDR-H3, of the VH sequences set forth in SEQ ID NOs: 1001, 1009, or 1015, and a first variable light (VL) chain sequence comprising three light chain CDR sequences, CDR-L1, CDR-L2, and CDR-L3, of the VL sequences set forth in SEQ ID NOs: 1005, 1013, 1125, or 1019, optionally wherein:
[0010] a. CDR-H1 comprises the sequence set forth in SEQ ID NO: 1002, CDR-H2 comprises the sequence set forth in SEQ ID NO: 1003, CDR-H3 comprises the sequence set forth in SEQ ID NO: 1004, CDR-L1 comprises the sequence set forth in SEQ ID NO: 1006, CDR-L2 comprises the sequence set forth in SEQ ID NO: 1007, and CDR-L3 comprises the sequence set forth in SEQ ID NO: 1008; or
[0011] b. CDR-H1 comprises the sequence set forth in SEQ ID NO: 1010, CDR-H2 comprises the sequence set forth in SEQ ID NO: 1011, CDR-H3 comprises the sequence set forth in SEQ ID NO: 1012, CDR-L1 comprises the sequence set forth in SEQ ID NO: 1006, CDR-L2 comprises the sequence set forth in SEQ ID NO: 1007, and CDR-L3 comprises the sequence set forth in SEQ ID NO: 1014; or
[0012] c. CDR-H1 comprises the sequence set forth in SEQ ID NO: 1016, CDR-H2 comprises the sequence set forth in SEQ ID NO: 1017, CDR-H3 comprises the sequence set forth in SEQ ID NO: 1018, CDR-L1 comprises the sequence set forth in SEQ ID NO: 1020, CDR-L2 comprises the sequence set forth in SEQ ID NO: 1021, and CDR-L3 comprises the sequence set forth in SEQ ID NO: 1022.

[0013] In some embodiments, the first VH chain sequence comprises the sequence set forth in SEQ ID NO: 1001, 1009, or 1015.

[0014] In some embodiments, the first VL chain sequence comprises the sequence set forth in SEQ ID NO: 1005, 1013, 1125, or 1019.

[0015] In some embodiments, wherein the first antigen-binding domain comprises the sequence set forth in SEQ ID NO: 1107, 1108, or 1109.

[0016] In some embodiments, the second antigen-binding domain comprises a second variable heavy (VH) chain sequence comprising three heavy chain CDR sequences, CDR-H1, CDR-H2, and CDR-H3, of the VH sequences set forth in SEQ ID NOs: 319 or 326, and a second variable light (VL) chain sequence comprising three light chain CDR sequences, CDR-L1, CDR-L2, and CDR-L3, of the VL sequence set forth in SEQ ID NOs: 320 or 327, optionally wherein:
[0017] a. CDR-H1 comprises the sequence set forth in SEQ ID NO: 321, CDR-H2 comprises the sequence set forth in SEQ ID NO: 322, CDR-H3 comprises the sequence set forth in SEQ ID NO: 323, CDR-L1 comprises the sequence set forth in SEQ ID NO: 324, CDR-L2 comprises the sequence set forth in SEQ ID NO: 325, and CDR-L3 comprises the sequence set forth in SEQ ID NO: 16; and
[0018] b. CDR-H1 comprises the sequence set forth in SEQ ID NO: 193, CDR-H2 comprises the sequence set forth in SEQ ID NO: 80, CDR-H3 comprises the sequence set forth in SEQ ID NO: 328, CDR-L1 comprises the sequence set forth in SEQ ID NO: 329, CDR-L2 comprises the sequence set forth in SEQ ID NO: 330, and CDR-L3 comprises the sequence set forth in SEQ ID NO: 331.

[0019] In some embodiments, the second VH comprises the sequence as set forth in SEQ ID NOs: 319 or 326.

[0020] In some embodiments, the second VL comprises the sequence set forth in SEQ ID NOs: 320 or 327.

[0021] In some embodiments, the second antigen binding domain comprises the sequence set forth in SEQ ID NO: 551 or 552.

[0022] In some embodiments,
[0023] a. the first antigen-binding domain comprises the first variable heavy (VH) chain sequence comprising three heavy chain CDR sequences, CDR-H1, CDR-H2, and CDR-H3, of the VH sequence set forth in SEQ ID NO: 1009, and the first variable light (VL) chain sequence comprising three light chain CDR sequences, CDR-L1, CDR-L2, and CDR-L3, of the VL sequence set forth in SEQ ID NO: 1013 and the second antigen-binding domain comprises the first variable heavy (VH) chain sequence comprising three heavy chain CDR sequences, CDR-H1, CDR-H2, and CDR-H3, of the VH sequence set forth in SEQ ID NO: 326, and the first variable light (VL) chain sequence comprising three light chain CDR sequences, CDR-L1, CDR-L2, and CDR-L3, of the VL sequence set forth in SEQ ID NO: 327;
[0024] b. the first antigen-binding domain comprises the first variable heavy (VH) chain sequence comprising three heavy chain CDR sequences, CDR-H1, CDR-H2, and CDR-H3, of the VH sequence set forth in SEQ ID NO: 1001, and the first variable light (VL) chain sequence comprising three light chain CDR sequences, CDR-L1, CDR-L2, and CDR-L3, of the VL sequence set forth in SEQ ID NO: 1005 and
the second antigen-binding domain comprises the first variable heavy (VH) chain sequence comprising three heavy chain CDR sequences, CDR-H1, CDR-H2, and CDR-H3, of the VH sequence set forth in SEQ ID NO: 326, and the first variable light (VL) chain sequence comprising three light chain CDR sequences, CDR-L1, CDR-L2, and CDR-L3, of the VL sequence set forth in SEQ ID NO: 327;
[0025] c. the first antigen-binding domain comprises the first variable heavy (VH) chain sequence comprising three heavy chain CDR sequences, CDR-H1, CDR-H2, and CDR-H3, of the VH sequence set forth in SEQ ID NO: 1009, and the first variable light (VL) chain sequence comprising three light chain CDR sequences, CDR-L1, CDR-L2, and CDR-L3, of the VL sequence set forth in SEQ ID NO: 1013 and
the second antigen-binding domain comprises the first variable heavy (VH) chain sequence comprising three heavy chain CDR sequences, CDR-H1, CDR-H2, and CDR-H3, of the VH sequence set forth in SEQ ID NO: 319, and the first variable light (VL) chain sequence comprising three light chain CDR sequences, CDR-L1, CDR-L2, and CDR-L3, of the VL sequence set forth in SEQ ID NO: 320;
[0026] d. the first antigen-binding domain comprises the first variable heavy (VH) chain sequence comprising three heavy chain CDR sequences, CDR-H1, CDR-H2, and CDR-H3, of the VH sequence set forth in SEQ ID NO: 1015, and the first variable light (VL) chain sequence comprising three light chain CDR sequences, CDR-L1, CDR-L2, and CDR-L3, of the VL sequence set forth in SEQ ID NO: 1019 or 1125 and
the second antigen-binding domain comprises the first variable heavy (VH) chain sequence comprising three heavy chain CDR sequences, CDR-H1, CDR-H2, and CDR-H3, of the VH sequence set forth in SEQ ID NO: 319, and the first variable light (VL) chain sequence comprising three light chain CDR sequences, CDR-L1, CDR-L2, and CDR-L3, of the VL sequence set forth in SEQ ID NO: 320; or
[0027] e. the first antigen-binding domain comprises the first variable heavy (VH) chain sequence comprising three heavy chain CDR sequences, CDR-H1, CDR-H2, and CDR-H3, of the VH sequence set forth in SEQ ID NO: 1009, and the first variable light (VL) chain sequence comprising three light chain CDR sequences, CDR-L1, CDR-L2, and CDR-L3, of the VL sequence set forth in SEQ ID NO: 1013 and
the second antigen-binding domain comprises the first variable heavy (VH) chain sequence comprising three heavy chain CDR sequences, CDR-H1, CDR-H2, and CDR-H3, of the VH sequence set forth in SEQ ID NO: 326, and the first variable light (VL) chain sequence comprising three light chain CDR sequences, CDR-L1, CDR-L2, and CDR-L3, of the VL sequence set forth in SEQ ID NO: 327.

[0028] In some embodiments,
[0029] a. the first antigen-binding domain comprises a CDR-H1 comprises the sequence set forth in SEQ ID NO: 1010, CDR-H2 comprises the sequence set forth in SEQ ID NO: 1011, CDR-H3 comprises the sequence set forth in SEQ ID NO: 1012, CDR-L1 comprises the sequence set forth in SEQ ID NO: 1006, CDR-L2 comprises the sequence set forth in SEQ ID NO: 1007, and CDR-L3 comprises the sequence set forth in SEQ ID NO: 1014 and
the second antigen-binding domain comprises a CDR-H1 comprises the sequence set forth in SEQ ID NO: 193, CDR-H2 comprises the sequence set forth in SEQ ID NO: 80, CDR-H3 comprises the sequence set forth in SEQ ID NO: 328, CDR-L1 comprises the sequence set forth in SEQ ID NO: 329, CDR-L2 comprises the sequence set forth in SEQ ID NO: 330, and CDR-L3 comprises the sequence set forth in SEQ ID NO: 331;
[0030] b. the first antigen-binding domain comprises a CDR-H1 comprises the sequence set forth in SEQ ID NO: 1002, CDR-H2 comprises the sequence set forth in SEQ ID NO: 1003, CDR-H3 comprises the sequence set forth in SEQ ID NO: 1004, CDR-L1 comprises the sequence set forth in SEQ ID NO: 1006, CDR-L2 comprises the sequence set forth in SEQ ID NO: 1007, and CDR-L3 comprises the sequence set forth in SEQ ID NO: 1008 and
the second antigen-binding domain comprises a CDR-H1 comprises the sequence set forth in SEQ ID NO: 193, CDR-H2 comprises the sequence set forth in SEQ ID NO: 80, CDR-H3 comprises the sequence set forth in SEQ ID NO: 328, CDR-L1 comprises the sequence set forth in SEQ ID NO: 329, CDR-L2 comprises the sequence set forth in SEQ ID NO: 330, and CDR-L3 comprises the sequence set forth in SEQ ID NO: 331;
[0031] c. the first antigen-binding domain comprises a CDR-H1 comprises the sequence set forth in SEQ ID NO: 1010, CDR-H2 comprises the sequence set forth in SEQ ID NO: 1011, CDR-H3 comprises the sequence set forth in SEQ ID NO: 1012, CDR-L1 comprises the sequence set forth in SEQ ID NO: 1006, CDR-L2 comprises the sequence set forth in SEQ ID NO: 1007, and CDR-L3 comprises the sequence set forth in SEQ ID NO: 1014 and
the second antigen-binding domain comprises a CDR-H1 comprises the sequence set forth in SEQ ID NO: 321, CDR-H2 comprises the sequence set forth in SEQ ID NO: 322, CDR-H3 comprises the sequence set forth in SEQ ID NO: 323, CDR-L1 comprises the sequence set forth in SEQ ID NO: 324, CDR-L2 comprises the sequence set forth in SEQ ID NO: 325, and CDR-L3 comprises the sequence set forth in SEQ ID NO: 16;
[0032] d. the first antigen-binding domain comprises a CDR-H1 comprises the sequence set forth in SEQ ID NO: 1016, CDR-H2 comprises the sequence set forth in SEQ ID NO: 1017, CDR-H3 comprises the sequence set forth in SEQ ID NO: 1018, CDR-L1 comprises the sequence set forth in SEQ ID NO: 1020, CDR-L2 comprises the sequence set forth in SEQ ID NO: 1021, and CDR-L3 comprises the sequence set forth in SEQ ID NO: 1022 and
the second antigen-binding domain comprises a CDR-H1 comprises the sequence set forth in SEQ ID NO: 321, CDR-H2 comprises the sequence set forth in SEQ ID NO: 322, CDR-H3 comprises the sequence set forth in SEQ ID NO: 323, CDR-L1 comprises the sequence set forth in SEQ ID NO: 324, CDR-L2 comprises the sequence set forth in SEQ ID NO: 325, and CDR-L3 comprises the sequence set forth in SEQ ID NO: 16; or
[0033] e. the first antigen-binding domain comprises a CDR-H1 comprises the sequence set forth in SEQ ID NO: 1010, CDR-H2 comprises the sequence set forth in SEQ ID NO: 1011, CDR-H3 comprises the sequence set forth in SEQ ID NO: 1012, CDR-L1 comprises the sequence set forth in SEQ ID NO: 1006, CDR-L2 comprises the sequence set forth in SEQ ID NO: 1007, and CDR-L3 comprises the sequence set forth in SEQ ID NO: 1014 and
the second antigen-binding domain comprises a CDR-H1 comprises the sequence set forth in SEQ ID NO: 193, CDR-H2 comprises the sequence set forth in SEQ ID NO: 80, CDR-H3 comprises the sequence set forth in SEQ ID NO: 328, CDR-L1 comprises the sequence set forth in SEQ ID NO: 329, CDR-L2 comprises the sequence set forth in SEQ ID NO: 330, and CDR-L3 comprises the sequence set forth in SEQ ID NO: 331.

[0034] In some embodiments, at least one or more nucleic acids comprising a nucleic acid sequence at least 15 nucleotides in length complementary to a portion thereof of:
[0035] a. a nucleic acid encoding human Fas Cell Surface Death Receptor (FAS) comprising the sequence set forth in SEQ ID NO: 964; and/or
[0036] b. a nucleic encoding human Transforming Growth factor (TGF)-β Receptor 2 (TGFBR2) comprising the sequence set forth in SEQ ID NO: 965; and/or
[0037] c. a nucleic acid encoding Phosphatase Non-Receptor Type 2 (PTPN2) comprising the sequence set forth in SEQ ID NO: 966.

[0038] In some embodiments, the at least one or more nucleic acids comprises a nucleic acid comprising the sequence as set forth in SEQ ID NO: 967.

[0039] In some embodiments, the at least one or more nucleic acids comprises a nucleic acid comprising the sequence as set forth in SEQ ID NOs: 969 and/or 970.

[0040] In some embodiments, the at least one or more nucleic acids comprises a nucleic acid comprising the sequence as set forth in SEQ ID NO: 968.

[0041] In some embodiments, the at least one or more nucleic acids comprises a first nucleic acid comprising the sequence as set forth in SEQ ID NO: 967, a second nucleic acid comprising the sequence as set forth in SEQ ID NOs: 969 and/or 970, and a third nucleic acid comprising the sequence as set forth in SEQ ID NO: 968.

[0042] In some embodiments, the at least one or more nucleic acids comprises a first nucleic acid comprising the sequence as set forth in SEQ ID NO: 967, a second nucleic acid comprising the sequence as set forth in SEQ ID NO: 969, and a third nucleic acid comprising the sequence as set forth in SEQ ID NO: 970, and a fourth nucleic acid comprising the sequence as set forth in SEQ ID NO: 968.

[0043] In some embodiments,
[0044] a. the nucleic acid is capable of reducing expression of FAS in the immune cell by at least 10%, 15%, 20%, 25%, 30%, 35%, 40%, 45%, 50%, 55%, 60%, 65%, 75%, 80%, 85%, 90%, 95%, or 99% as compared to a control cell that does not comprise the nucleic acid;
[0045] b. the nucleic acid is capable of reducing expression of TGFBR2 in the immune cell by at least 10%, 15%, 20%, 25%, 30%, 35%, 40%, 45%, 50%, 55%, 60%, 65%, 75%, 80%, 85%, 90%, 95%, or 99% as compared to a control cell that does not comprise the nucleic acid; and/or
[0046] c. the nucleic acid is capable of reducing expression of PTPN2 in the immune cell by at least 10%, 15%, 20%, 25%, 30%, 35%, 40%, 45%, 50%, 55%, 60%, 65%, 75%, 80%, 85%, 90%, 95%, or 99% as compared to a control cell that does not comprise the nucleic acid.

[0047] In one aspect, provided herein are systems comprising:
[0048] a. a first chimeric polypeptide comprising a priming receptor comprising a first antigen-binding domain that specifically binds Solute Carrier Family 34 Member 2 (SLC34A2) (SEQ ID NO: 962);
[0049] b. a second chimeric polypeptide comprising a chimeric antigen receptor (CAR) comprising a second antigen-binding domain that specifically binds to Transmembrane protease, serine 4 (TMPRSS4) (SEQ ID NO: 960); and
[0050] c. at least one or more nucleic acids comprising a nucleic acid sequence at least 15 nucleotides in length complementary to a portion thereof of:
   [0051] i. a nucleic acid encoding human Fas Cell Surface Death Receptor (FAS) comprising the sequence set forth in SEQ ID NO: 964; and/or
   [0052] ii. a nucleic acid encoding human Transforming Growth factor (TGF)-β Receptor 2 (TGFBR2) comprising the sequence set forth in SEQ ID NO: 965; and/or
   [0053] iii. a nucleic acid encoding Phosphatase Non-Receptor Type 2 (PTPN2) comprising the sequence set forth in SEQ ID NO: 966.

[0054] In some embodiments, the first antigen-binding domain comprises a first variable heavy (VH) chain sequence comprising three heavy chain CDR sequences, CDR-H1, CDR-H2, and CDR-H3, of the VH sequences set forth in SEQ ID NOs: 1001, 1009, or 1015, and a first variable light (VL) chain sequence comprising three light chain CDR sequences, CDR-L1, CDR-L2, and CDR-L3, of the VL sequences set forth in SEQ ID NOs: 1005, 1013, 1125, or 1019, optionally wherein:
[0055] a. CDR-H1 comprises the sequence set forth in SEQ ID NO: 1002, CDR-H2 comprises the sequence set forth in SEQ ID NO: 1003, CDR-H3 comprises the sequence set forth in SEQ ID NO: 1004, CDR-L1 comprises the sequence set forth in SEQ ID NO: 1006, CDR-L2 comprises the sequence set forth in SEQ ID NO: 1007, and CDR-L3 comprises the sequence set forth in SEQ ID NO: 1008; or
[0056] b. CDR-H1 comprises the sequence set forth in SEQ ID NO: 1010, CDR-H2 comprises the sequence set forth in SEQ ID NO: 1011, CDR-H3 comprises the sequence set forth in SEQ ID NO: 1012, CDR-L1 comprises the sequence set forth in SEQ ID NO: 1006, CDR-L2 comprises the sequence set forth in SEQ ID NO: 1007, and CDR-L3 comprises the sequence set forth in SEQ ID NO: 1014; or
[0057] c. CDR-H1 comprises the sequence set forth in SEQ ID NO: 1016, CDR-H2 comprises the sequence set forth in SEQ ID NO: 1017, CDR-H3 comprises the sequence set forth in SEQ ID NO: 1018, CDR-L1 comprises the sequence set forth in SEQ ID NO: 1020, CDR-L2 comprises the sequence set forth in SEQ ID NO: 1021, and CDR-L3 comprises the sequence set forth in SEQ ID NO: 1022.

[0058] In some embodiments, the first VH chain sequence comprises the sequence set forth in SEQ ID NOs: 1001, 1009, or 1015.

[0059] In some embodiments, the first VL chain sequence comprises the sequence set forth in SEQ ID NOs: 1005, 1013, 1125, or 1019.

[0060] In some embodiments, the first antigen-binding domain comprises the sequence set forth in SEQ ID NOs: 1107, 1108, or 1109.

[0061] In some embodiments, the second antigen-binding domain comprises a second variable heavy (VH) chain sequence comprising three heavy chain CDR sequences, CDR-H1, CDR-H2, and CDR-H3, of the VH sequences set forth in SEQ ID NOs: 319 or 326, and a second variable light (VL) chain sequence comprising three light chain CDR sequences, CDR-L1, CDR-L2, and CDR-L3, of the VL sequence set forth in SEQ ID NOs: 320 or 327, optionally wherein:
[0062] a. CDR-H1 comprises the sequence set forth in SEQ ID NO: 321, CDR-H2 comprises the sequence set forth in SEQ ID NO: 322, CDR-H3 comprises the sequence set forth in SEQ ID NO: 323, CDR-L1 comprises the sequence set forth in SEQ ID NO: 324, CDR-L2 comprises the sequence set forth in SEQ ID NO: 325, and CDR-L3 comprises the sequence set forth in SEQ ID NO: 16; and
[0063] b. CDR-H1 comprises the sequence set forth in SEQ ID NO: 193, CDR-H2 comprises the sequence set forth in SEQ ID NO: 80, CDR-H3 comprises the sequence set forth in SEQ ID NO: 328, CDR-L1 comprises the sequence set forth in SEQ ID NO: 329, CDR-L2 comprises the sequence set forth in SEQ ID NO: 330, and CDR-L3 comprises the sequence set forth in SEQ ID NO: 331.

[0064] In some embodiments, the second VH comprises the sequence as set forth in SEQ ID NOs: 319 or 326.

[0065] In some embodiments, the second VL comprises the sequence set forth in SEQ ID NOS: 320 or 327.

[0066] In some embodiments, the second antigen binding domain comprises the sequence set forth in SEQ ID NOs: 551 or 552.

[0067] In some embodiments, the priming receptor comprises, from N-terminus to C-terminus,
[0068] a. the first antigen-binding domain;
[0069] b. a first transmembrane domain comprising one or more ligand-inducible proteolytic cleavage sites; and
[0070] c. an intracellular domain comprising a human or humanized transcriptional effector, wherein binding of the first antigen-binding domain to human SCL34A2 results in cleavage at the one or more ligand-inducible proteolytic cleavage sites.

[0071] In some embodiments, the priming receptor comprises a first hinge domain positioned between the first antigen-binding domain and the first transmembrane domain.

[0072] In some embodiments, the first hinge domain comprises a CD8α or truncated CD8α hinge domain.

[0073] In some embodiments, the first hinge comprises the sequence as set forth in SEQ ID NO: 827.

[0074] In some embodiments, the first transmembrane domain comprises a Notch1 transmembrane domain.

[0075] In some embodiments, the transmembrane domain comprises the sequence as set forth in SEQ ID NO: 828.

[0076] In some embodiments, the intracellular domain comprises an HNF1α/p65 domain or a Gal4/VP64 domain.

[0077] In some embodiments, the intracellular domain comprises the sequence as set forth in SEQ ID NO: 830, 831, or 832.

[0078] In some embodiments, the priming receptor comprises a stop-transfer-sequence or juxtamembrane domain between the first transmembrane domain and the intracellular domain.

[0079] In some embodiments, the stop-transfer-sequence or juxtamembrane domain comprises the sequence as set forth in SEQ ID NO: 829.

[0080] In some embodiments, the priming receptor comprises a sequence as set forth in SEQ ID NO: 1158, 1160, or 1162.

[0081] In some embodiments, the CAR comprises, from N-terminus to C-terminus,
[0082] a. a second antigen-binding domain;
[0083] b. a second transmembrane domain;
[0084] c. an intracellular co-stimulatory domain; and
[0085] d. an intracellular activation domain.

[0086] In some embodiments, the CAR comprises a second hinge domain.

[0087] In some embodiments, the second hinge domain comprises a CD8α or truncated CD8α hinge domain.

[0088] In some embodiments, the second hinge domain comprises a sequence as set forth in SEQ ID NO: 821.

[0089] In some embodiments, the second transmembrane domain comprises a CD8α transmembrane domain.

[0090] In some embodiments, the second transmembrane domain comprises a sequence as set forth in SEQ ID NO: 822.

[0091] In some embodiments, the intracellular co-stimulatory domain comprises a 4-1BB domain.

[0092] In some embodiments, the intracellular co-stimulatory domain comprises a sequence as set forth in SEQ ID NO: 823.

[0093] In some embodiments, the intracellular activation domain comprises a CD35 domain.

[0094] In some embodiments, the intracellular activation domain comprises a sequence as set forth in SEQ ID NO: 824.

[0095] In some embodiments, the CAR comprises a sequence as set forth in SEQ ID NOs: 1164 or 1166.

[0096] In some embodiments, the priming receptor and the CAR are capable of binding to a same target cell if the target cell expresses SLC34A2 and TMPRSS4.

[0097] In some embodiments, the at least one or more nucleic acids comprising a nucleic acid sequence at least 15 nucleotides in length complementary a portion thereof of human FAS, human TGFBR2 and/or human PTPN2 are at least 16, 17, 18, 19, 20, 21, or 22 nucleotides in length.

[0098] In some embodiments, the at least one or more nucleic acid sequences are a short hairpin RNA (shRNA), a small interfering RNA (siRNA), a double stranded RNA (dsRNA), or an antisense oligonucleotide.

[0099] In some embodiments, the at least one or more nucleic acid sequences are shRNA.

[0100] In some embodiments, the at least one or more nucleic acids comprises a sequence selected from the group consisting of the sequences set forth in SEQ ID NOs: 967-970.

[0101] In some embodiments, the nucleic acid sequence complementary to a nucleic acid encoding human FAS comprises a sequence as set forth in SEQ ID NO: 967.

[0102] In some embodiments, the nucleic acid reduces expression of FAS in the immune cell by at least 10%, 15%, 20%, 25%, 30%, 35%, 40%, 45%, 50%, 55%, 60%, 65%, 75%, 80%, 85%, 90%, 95%, or 99% as compared to a control cell that does not comprise the nucleic acid.

[0103] In some embodiments, the nucleic acid sequence complementary to a nucleic acid encoding human TGFBR2 comprises a sequence as set forth in SEQ ID NOs: 969 or 970.

[0104] In some embodiments, the nucleic acid reduces expression of TGFBR2 in the immune cell by at least 10%, 15%, 20%, 25%, 30%, 35%, 40%, 45%, 50%, 55%, 60%, 65%, 75%, 80%, 85%, 90%, 95%, or 99% as compared to a control cell that does not comprise the nucleic acid.

[0105] In some embodiments, the system comprises at least two nucleic acid sequences complementary to a nucleic acid encoding human TGFBR2 comprising the sequences as set forth in SEQ ID NOs: 969 and 970.

[0106] In some embodiments, the nucleic acid sequence complementary to human PTPN2 comprises a sequence set forth in SEQ ID NO: 968.

[0107] In some embodiments, the nucleic acid reduces expression of PTPN2 in the immune cell by at least 10%, 15%, 20%, 25%, 30%, 35%, 40%, 45%, 50%, 55%, 60%, 65%, 75%, 80%, 85%, 90%, 95%, or 99% as compared to a control cell that does not comprise the nucleic acid.

[0108] In some embodiments, the at least one or more nucleic acids comprising a nucleic acid sequence at least 15 nucleotides in length complementary a portion thereof of human FAS, human TGFBR2, and human PTPN2 comprises a sequence as set forth in SEQ ID NO: 1252 or 972.

[0109] In some embodiments, the nucleic acid sequence complementary to a nucleic acid encoding human FAS reduces expression of FAS in the immune cell by at least 10%, 15%, 20%, 25%, 30%, 35%, 40%, 45%, 50%, 55%, 60%, 65%, 75%, 80%, 85%, 90%, 95%, or 99% as compared to a control cell that does not comprise the nucleic acid, the nucleic acid sequence(s) complementary to a nucleic acid encoding human TGFBR2 reduces expression of TGFBR2 in the immune cell by at least 10%, 15%, 20%, 25%, 30%, 35%, 40%, 45%, 50%, 55%, 60%, 65%, 75%, 80%, 85%, 90%, 95%, or 99% as compared to a control cell that does not comprise the nucleic acid, and the nucleic acid sequence complementary to a nucleic acid encoding human PTPN2 reduces expression of PTPN2 in the immune cell by at least 10%, 15%, 20%, 25%, 30%, 35%, 40%, 45%, 50%, 55%, 60%, 65%, 75%, 80%, 85%, 90%, 95%, or 99% as compared to a control cell that does not comprise the nucleic acid.

[0110] In some embodiments, the system is encoded by: a nucleic acid sequence with at least 80%, 85%, 90%, 91%, 92%, 93%, 94%, 95%, 96%, 97%, 98%, 99%, or 100% identity to a sequence as set forth in SEQ ID NO: 1238; a nucleic acid sequence with at least 80%, 85%, 90%, 91%, 92%, 93%, 94%, 95%, 96%, 97%, 98%, 99%, or 100% identity to a sequence as set forth in SEQ ID NO: 1239; a nucleic acid sequence with at least 80%, 85%, 90%, 91%, 92%, 93%, 94%, 95%, 96%, 97%, 98%, 99%, or 100% identity to a sequence as set forth in SEQ ID NO: 1240; a nucleic acid sequence with at least 80%, 85%, 90%, 91%, 92%, 93%, 94%, 95%, 96%, 97%, 98%, 99%, or 100% identity to a sequence as set forth in SEQ ID NO: 1241; a nucleic acid sequence with at least 80%, 85%, 90%, 91%, 92%, 93%, 94%, 95%, 96%, 97%, 98%, 99%, or 100% identity to a sequence as set forth in SEQ ID NO: 1242; a nucleic acid sequence with at least 80%, 85%, 90%, 91%, 92%, 93%, 94%, 95%, 96%, 97%, 98%, 99%, or 100% identity to a sequence comprising nucleotides 481-7257 of SEQ ID NO: 1120; a nucleic acid sequence with at least 80%, 85%, 90%, 91%, 92%, 93%, 94%, 95%, 96%, 97%, 98%, 99%, or 100% identity to a sequence comprising nucleotides 481-7239 of SEQ ID NO: 1121; a nucleic acid sequence with at least 80%, 85%, 90%, 91%, 92%, 93%, 94%, 95%, 96%, 97%, 98%, 99%, or 100% identity to a sequence comprising nucleotides 481-7621 of SEQ ID NO: 1122; a nucleic acid sequence with at least 80%, 85%, 90%, 91%, 92%, 93%, 94%, 95%, 96%, 97%, 98%, 99%, or 100% identity to a sequence comprising nucleotides 481-7636 of SEQ ID NO: 1123; a nucleic acid sequence with at least 80%, 85%, 90%, 91%, 92%, 93%, 94%, 95%, 96%, 97%, 98%, 99%, or 100% identity to a sequence comprising nucleotides 481-7621 of SEQ ID NO: 1124; a nucleic acid sequence with at least 80%, 85%, 90%, 91%, 92%, 93%, 94%, 95%, 96%, 97%, 98%, 99%, or 100% identity to a sequence comprising nucleotides 24-7707 of SEQ ID NO: 1120; a nucleic acid sequence with at least 80%, 85%, 90%, 91%, 92%, 93%, 94%, 95%, 96%, 97%, 98%, 99%, or 100% identity to a sequence comprising nucleotides 24-7689 of SEQ ID NO: 1121; a nucleic acid sequence with at least 80%, 85%, 90%, 91%, 92%, 93%, 94%, 95%, 96%, 97%, 98%, 99%, or 100% identity to a sequence comprising nucleotides 24-8071 of SEQ ID NO: 1122; a nucleic acid sequence with at least 80%, 85%, 90%, 91%, 92%, 93%, 94%, 95%, 96%, 97%, 98%, 99%, or 100% identity to a sequence comprising nucleotides 24-8086 of SEQ ID NO: 1123; or a nucleic acid sequence with at least 80%, 85%, 90%, 91%, 92%, 93%, 94%, 95%, 96%, 97%, 98%, 99%, or 100% identity to a sequence comprising nucleotides 24-8071 of SEQ ID NO: 1124.

[0111] In some embodiments, the system is encoded by a nucleic acid comprising a sequence with at least 80%, 85%, 90%, 91%, 92%, 93%, 94%, 95%, 96%, 97%, 98%, 99%, or 100% identity to a sequence selected from the group consisting of the sequences set forth in SEQ ID NOs: 1120, 1121, 1122, 1123, 1124, 1238, 1239, 1240, 1241, or 1242.

[0112] In some embodiments, the target cell is a human cell.

[0113] In some embodiments, the target cell is a cancer cell expressing TMPRSS4 on its cell surface.

[0114] In some embodiments, the target cell is a cancer cell expressing SLC34A2 and TMPRSS4 on its cell surface.

[0115] In some embodiments, the cancer cell is a solid cancer cell or a liquid cancer cell.

[0116] In some embodiments, the cancer cell is a lung cell, optionally wherein the cancer cell is a non-small cell lung cancer (NSCLC) cell, ovarian cancer, cervical cancer, endometrial cancer, uterine cancer, pancreatic cancer, esophageal cancer, head and neck squamous cell cancer, thyroid cancer, bladder cancer, breast cancer, cholangiocarcinoma cancer, colon cancer, rectal cancer, kidney cancer, renal cell carcinoma, prostate cancer, stomach cancer, or gastric cancer.

[0117] In one aspect, provided herein are one or more nucleic acid(s) comprising at least one nucleic acid fragment comprising a nucleotide sequence encoding the system disclosed herein.

[0118] In some embodiments, the nucleic acid comprises a sequence with at least 80%, 85%, 90%, 91%, 92%, 93%, 94%, 95%, 96%, 97%, 98%, 99%, or 100% identity to a sequence as set forth in SEQ ID NO: 1238; a sequence with at least 80%, 85%, 90%, 91%, 92%, 93%, 94%, 95%, 96%, 97%, 98%, 99%, or 100% identity to a sequence as set forth in SEQ ID NO: 1239; a sequence with at least 80%, 85%, 90%, 91%, 92%, 93%, 94%, 95%, 96%, 97%, 98%, 99%, or 100% identity to a sequence as set forth in SEQ ID NO: 1240; a sequence with at least 80%, 85%, 90%, 91%, 92%, 93%, 94%, 95%, 96%, 97%, 98%, 99%, or 100% identity to a sequence as set forth in SEQ ID NO: 1241; a sequence with at least 80%, 85%, 90%, 91%, 92%, 93%, 94%, 95%, 96%, 97%, 98%, 99%, or 100% identity to a sequence as set forth in SEQ ID NO: 1242; at least 80%, 85%, 90%, 91%, 92%, 93%, 94%, 95%, 96%, 97%, 98%, 99%, or 100% identity to a sequence comprising nucleotides 481-7257 of SEQ ID NO: 1120; a sequence with at least 80%, 85%, 90%, 91%, 92%, 93%, 94%, 95%, 96%, 97%, 98%, 99%, or 100% identity to a sequence comprising nucleotides 481-7239 of SEQ ID NO: 1121; a sequence with at least 80%, 85%, 90%, 91%, 92%, 93%, 94%, 95%, 96%, 97%, 98%, 99%, or 100% identity to a sequence comprising nucleotides 481-7621 of SEQ ID NO: 1122; a sequence with at least 80%, 85%, 90%, 91%, 92%, 93%, 94%, 95%, 96%, 97%, 98%, 99%, or 100% identity to a sequence comprising nucleotides 481-7636 of SEQ ID NO: 1123; or a sequence with at least 80%, 85%, 90%, 91%, 92%, 93%, 94%, 95%, 96%, 97%, 98%, 99%, 100% identity to a sequence comprising nucleotides 481-7621 of SEQ ID NO: 1124; a sequence with at least 80%, 85%, 90%, 91%, 92%, 93%, 94%, 95%, 96%, 97%, 98%, 99%, or 100% identity to a sequence as set forth in SEQ ID NO: 1120; a sequence with at least 80%, 85%, 90%, 91%, 92%, 93%, 94%, 95%, 96%, 97%, 98%, 99%, or 100% identity to a sequence as set forth in SEQ ID NO: 1121; a sequence with at least 80%, 85%, 90%, 91%, 92%, 93%, 94%, 95%, 96%, 97%, 98%, 99%, or 100% identity to a sequence as set forth in SEQ ID NO: 1122, a sequence with at least 80%, 85%, 90%, 91%, 92%, 93%, 94%, 95%, 96%, 97%, 98%, 99%, or 100% identity to a sequence as set forth in SEQ ID NO: 1123, a sequence with at least 80%, 85%, 90%, 91%, 92%, 93%, 94%, 95%, 96%, 97%, 98%, 99%, or 100% identity to a sequence as set forth in SEQ ID NO: 1124; a sequence with at least 80%, 85%, 90%, 91%, 92%, 93%, 94%, 95%, 96%, 97%, 98%, 99%, or 100% identity to a sequence comprising nucleotides 24-7707 of SEQ ID NO: 1120; a sequence with at least 80%, 85%, 90%, 91%, 92%, 93%, 94%, 95%, 96%, 97%, 98%, 99%, or 100% identity to a sequence comprising nucleotides 24-7689 of SEQ ID NO: 1121; a sequence with at least 80%, 85%, 90%, 91%, 92%, 93%, 94%, 95%, 96%, 97%, 98%, 99%, or 100% identity to a sequence comprising nucleotides 24-8071 of SEQ ID NO: 1122; a sequence with at least 80%, 85%, 90%, 91%, 92%, 93%, 94%, 95%, 96%, 97%, 98%, 99%, or 100% identity to a sequence comprising nucleotides 24-8086 of SEQ ID NO: 1123; or a sequence with at least 80%, 85%, 90%, 91%, 92%, 93%, 94%, 95%, 96%, 97%, 98%, 99%, or 100% identity to a sequence comprising nucleotides 24-8071 of SEQ ID NO: 1124.

[0119] In some embodiments, the nucleic acid comprises a sequence selected from the group consisting of the sequences set forth in SEQ ID NOs: 1120, 1121, 1122, 1123, 1124, 1238, 1239, 1240, 1241 or 1242.

[0120] In one aspect, provided herein are one or more nucleic acid(s), wherein the one or more nucleic acid(s) encode:
[0121] a. a first chimeric polypeptide comprising a priming receptor comprising a first antigen-binding domain that specifically binds to human Solute Carrier Family 34 Member 2 (SLC34A2);
[0122] b. a second chimeric polypeptide comprising a chimeric antigen receptor (CAR) comprising a second antigen-binding domain that specifically binds to human Transmembrane protease, serine 4 (TMPRSS4).

[0123] In some embodiments, the nucleic acid(s) comprise comprising at least one nucleic acid sequence at least 15 nucleotides in length complementary to a portion thereof of:
[0124] a. a nucleic acid encoding human Fas Cell Surface Death Receptor (FAS) comprising the sequence set forth in SEQ ID NO: 964; and/or
[0125] b. a nucleic acid encoding human Transforming Growth factor (TGF)-β Receptor 2 (TGFBR2) comprising the sequence set forth in SEQ ID NO: 965; and/or
[0126] c. a nucleic acid encoding Phosphatase Non-Receptor Type 2 (PTPN2) comprising the sequence set forth in SEQ ID NO: 966.

[0127] In one aspect, provided herein are one or more nucleic acid(s), wherein the one or more nucleic acids encode:
[0128] a. a first chimeric polypeptide comprising a priming receptor comprising a first antigen-binding domain that specifically binds to human Solute Carrier Family 34 Member 2 (SLC34A2);
[0129] b. a second chimeric polypeptide comprising a chimeric antigen receptor (CAR) comprising a second antigen-binding domain that specifically binds to human Transmembrane protease, serine 4 (TMPRSS4); and
[0130] c. at least one nucleic acid sequence at least 15 nucleotides in length complementary to a portion thereof of:
   [0131] i. a nucleic acid encoding human Fas Cell Surface Death Receptor (FAS) comprising the sequence set forth in SEQ ID NO: 964; and/or
   [0132] ii. a nucleic acid encoding human Transforming Growth factor (TGF)-β Receptor 2 (TGFBR2) comprising the sequence set forth in SEQ ID NO: 965; and/or
   [0133] iii. a nucleic acid encoding human Protein Tyrosine Phosphatase Non-Receptor Type 2 (PTPN2) comprising the sequence set forth in SEQ ID NO: 966.

[0134] In some embodiments, the first antigen-binding domain comprises a heavy chain comprising a first variable heavy (VH) chain sequence comprising three heavy chain CDR sequences, CDR-H1, CDR-H2, and CDR-H3, of the VH sequences set forth in SEQ ID NOs: 1001, 1009, or 1015, and a first variable light (VL) chain sequence comprising three light chain CDR sequences, CDR-L1, CDR-L2, and CDR-L3, of the VL sequences set forth in SEQ ID NOs: 1005, 1013, 1125, or 1019, optionally wherein:
[0135] a. CDR-H1 comprises the sequence set forth in SEQ ID NO: 1002, CDR-H2 comprises the sequence set forth in SEQ ID NO: 1003, CDR-H3 comprises the sequence set forth in SEQ ID NO: 1004, CDR-L1 comprises the sequence set forth in SEQ ID NO: 1006, CDR-L2 comprises the sequence set forth in SEQ ID NO: 1007, and CDR-L3 comprises the sequence set forth in SEQ ID NO: 1008; or
[0136] b. CDR-H1 comprises the sequence set forth in SEQ ID NO: 1010, CDR-H2 comprises the sequence set forth in SEQ ID NO: 1011, CDR-H3 comprises the sequence set forth in SEQ ID NO: 1012, CDR-L1 comprises the sequence set forth in SEQ ID NO: 1006, CDR-L2 comprises the sequence set forth in SEQ ID NO: 1007, and CDR-L3 comprises the sequence set forth in SEQ ID NO: 1014; or
[0137] c. CDR-H1 comprises the sequence set forth in SEQ ID NO: 1016, CDR-H2 comprises the sequence set forth in SEQ ID NO: 1017, CDR-H3 comprises the sequence set forth in SEQ ID NO: 1018, CDR-L1 comprises the sequence set forth in SEQ ID NO: 1020, CDR-L2 comprises the sequence set forth in SEQ ID NO: 1021, and CDR-L3 comprises the sequence set forth in SEQ ID NO: 1022.

[0138] In some embodiments, the first VH chain sequence comprises the VH sequence set forth in SEQ ID NOs: 1001, 1009, or 1015.

[0139] In some embodiments, the second VL comprises the sequence set forth in SEQ ID NOs: 1005, 1013, 1125, or 1019.

[0140] In some embodiments, the first antigen-binding domain comprises the sequence set forth in SEQ ID NOs: 1107, 1108, or 1109.

[0141] In some embodiments, the second antigen-binding domain comprises a second variable heavy (VH) chain sequence comprising three heavy chain CDR sequences, CDR-H1, CDR-H2, and CDR-H3, of the VH sequences set forth in SEQ ID NOs: 319 or 326, and a second variable light (VL) chain sequence comprising three light chain CDR sequences, CDR-L1, CDR-L2, and CDR-L3, of the VL sequence set forth in SEQ ID NOs: 320 or 327, optionally wherein:
[0142] a. CDR-H1 comprises the sequence set forth in SEQ ID NO: 321, CDR-H2 comprises the sequence set forth in SEQ ID NO: 322, CDR-H3 comprises the sequence set forth in SEQ ID NO: 323, CDR-L1 comprises the sequence set forth in SEQ ID NO: 324, CDR-L2 comprises the sequence set forth in SEQ ID NO: 325, and CDR-L3 comprises the sequence set forth in SEQ ID NO: 16; and
[0143] b. CDR-H1 comprises the sequence set forth in SEQ ID NO: 193, CDR-H2 comprises the sequence set forth in SEQ ID NO: 80, CDR-H3 comprises the sequence set forth in SEQ ID NO: 328, CDR-L1 comprises the sequence set forth in SEQ ID NO: 329, CDR-L2 comprises the sequence set forth in SEQ ID NO: 330, and CDR-L3 comprises the sequence set forth in SEQ ID NO: 331.

[0144] In some embodiments, the second VH comprises the sequence as set forth in SEQ ID NO: 319 or 326.

[0145] In some embodiments, the second VL comprises the sequence set forth in SEQ ID NOS: 320 or 327.

[0146] In some embodiments, the second antigen binding domain comprises the sequence set forth in SEQ ID NO: 551 or 552.

[0147] In some embodiments, the at least one or more nucleic acids comprising a nucleic acid sequence at least 15 nucleotides in length complementary to a portion thereof of human FAS, human TGFBR2 and/or human PTPN2 are at least 16, 17, 18, 19, 20, 21, or 22 nucleotides in length.

[0148] In some embodiments, the at least one nucleic acid sequences are a short hairpin RNA (shRNA), a small interfering RNA (siRNA), a double stranded RNA (dsRNA), or an antisense oligonucleotide.

[0149] In some embodiments, the at least one nucleic acid sequences are shRNA.

[0150] In some embodiments, the at least one or more nucleic acids comprises a sequence with at least 80%, 85%, 90%, 91%, 92%, 93%, 94%, 95%, 96%, 97%, 98%, 99%, or 100% identity to a sequence as set forth in SEQ ID NO: 967.

[0151] In some embodiments, the at least one or more nucleic acid reduces expression of FAS in the immune cell by at least 10%, 15%, 20%, 25%, 30%, 35%, 40%, 45%, 50%, 55%, 60%, 65%, 75%, 80%, 85%, 90%, 95%, or 99% as compared to a control cell that does not comprise the nucleic acid.

[0152] In some embodiments, the at least one or more nucleic acid comprises a sequence selected from the group consisting of the sequences set forth in SEQ ID NOs: 969 and/or 970.

[0153] In some embodiments, the at least one or more nucleic acid reduces expression of TGFBR2 in the immune cell by at least 10%, 15%, 20%, 25%, 30%, 35%, 40%, 45%, 50%, 55%, 60%, 65%, 75%, 80%, 85%, 90%, 95%, or 99% as compared to a control cell that does not comprise the nucleic acid.

[0154] In some embodiments, the at least one or more nucleic acid comprise at least one nucleic acid sequence at least 15 nucleotides in length complementary a portion thereof of to a nucleic acid encoding human PTPN2 comprising the sequence set forth in SEQ ID NO: 966.

[0155] In some embodiments, the nucleic acid sequence complementary to human PTPN2 comprises a sequence as set forth in SEQ ID NO: 968.

[0156] In some embodiments, the nucleic acid reduces expression of PTPN2 in the immune cell by at least 10%, 15%, 20%, 25%, 30%, 35%, 40%, 45%, 50%, 55%, 60%, 65%, 75%, 80%, 85%, 90%, 95%, or 99% as compared to a control cell that does not comprise the nucleic acid.

[0157] In some embodiments, the at least one or more nucleic acids comprising a nucleic acid sequence at least 15 nucleotides in length complementary a portion thereof of to human FAS, human TGFBR2, and human PTPN2 comprises a sequence as set forth in SEQ ID NO: 1252 or 972.

[0158] In some embodiments, the at least one or more nucleic acid sequence is encoded in at least one intron region of the nucleic acid.

[0159] In one aspect, provided herein are one or more nucleic acid(s) comprising the nucleic acid(s) disclosed herein.

[0160] In some embodiments, the nucleic acid comprises two or more nucleic acid fragments.

[0161] In some embodiments, the nucleic acid comprises an inducible promoter operably linked to the nucleotide sequence encoding the CAR, wherein the inducible promoter drives the inducible expression of the CAR.

[0162] In some embodiments, the nucleic acid comprises a constitutive promoter operably linked to the nucleotide sequence encoding the priming receptor, wherein the constitutive promoter drives constitutive expression of the priming receptor.

[0163] In some embodiments, the nucleic acid comprises an inducible promoter element operably linked to the nucleotide sequence encoding the chimeric antigen receptor and a constitutive promoter operably linked to the nucleotide sequence encoding the priming receptor.

[0164] In some embodiments, the constitutive promoter is an EF1α promoter.

[0165] In some embodiments, the constitutive promoter comprises a sequence as set forth in SEQ ID NO: 991.

[0166] In some embodiments, the inducible promoter comprises a YB-TATA promoter sequence and one or more Hepatocyte Nuclear Factor 1α (HNF1α) response element(s).

[0167] In some embodiments, the YB-TATA promoter sequence comprises a sequence as set forth in SEQ ID NO: 1246.

[0168] In some embodiments, the one or more Hepatocyte Nuclear Factor 1α (HNF1α) response element(s) comprises a sequence as set forth in SEQ ID NO: 1245.

[0169] In some embodiments, the inducible promoter comprises a sequence as set forth in SEQ ID NO: 992.

[0170] In some embodiments, the nucleic acid comprises, in a 5′ to 3′ direction,
[0171] a. the constitutive promoter;
[0172] b. the nucleotide sequence encoding priming receptor;
[0173] c. the inducible promoter element; and
[0174] d. the nucleotide sequence encoding chimeric antigen receptor.

[0175] In some embodiments, the nucleic acid comprises, in a 5′ to 3′ direction,
[0176] a. the inducible promoter element;
[0177] b. the nucleotide sequence encoding chimeric antigen receptor;
[0178] c. the constitutive promoter; and
[0179] d. the nucleotide sequence encoding priming receptor.

[0180] In some embodiments, the nucleic acid comprises, in a 5′ to 3′ direction,
[0181] a. a first constitutive promoter;
[0182] b. the nucleotide sequence encoding the priming receptor;
[0183] c. optionally, a second constitutive promoter;
[0184] d. the nucleotide sequence encoding the at least one nucleic acid complementary to human FAS, human TGFBR2, and/or human PTPN2;
[0185] e. the inducible promoter element; and
[0186] f. the optional nucleotide sequence encoding the chimeric antigen receptor.

[0187] In some embodiments, the nucleic acid comprises, in a 5′ to 3′ direction,
[0188] a. a first constitutive promoter;
[0189] b. the nucleotide sequence encoding the priming receptor;
[0190] c. optionally, a second constitutive promoter;
[0191] d. the nucleotide sequence encoding the first nucleic acid complementary to human FAS and/or the nucleotide sequence encoding the second nucleic acid complementary to human TGFBR2 and/or the nucleotide sequence encoding the third nucleic acid complementary to human PTPN2;
[0192] e. the nucleotide sequence encoding the first nucleic acid complementary to human FAS and/or the nucleotide sequence encoding the second nucleic acid complementary to human TGFBR2 and/or the nucleotide sequence encoding the third nucleic acid complementary to human PTPN2;
[0193] f. the nucleotide sequence encoding the first nucleic acid complementary to human FAS and/or the nucleotide sequence encoding the second nucleic acid complementary to human TGFBR2 and/or the nucleotide sequence encoding the third nucleic acid complementary to human PTPN2;
[0194] g. the inducible promoter element; and
[0195] h. the nucleotide sequence encoding the chimeric antigen receptor.

[0196] In some embodiments, the nucleic acid comprises, in a 5′ to 3′ direction,
[0197] a. the inducible promoter;
[0198] b. the nucleotide sequence encoding the chimeric antigen receptor;
[0199] c. a first constitutive promoter;
[0200] d. the nucleotide sequence encoding the first nucleic acid complementary to human FAS and/or the nucleotide sequence encoding the second nucleic acid complementary to human TGFBR2 and/or the nucleotide sequence encoding the third nucleic acid complementary to human PTPN2;
[0201] e. the nucleotide sequence encoding the first nucleic acid complementary to human FAS and/or the nucleotide sequence encoding the second nucleic acid complementary to human TGFBR2 and/or the nucleotide sequence encoding the third nucleic acid complementary to human PTPN2;
[0202] f. the nucleotide sequence encoding the first nucleic acid complementary to human FAS and/or the nucleotide sequence encoding the second nucleic acid complementary to human TGFBR2 and/or the nucleotide sequence encoding the third nucleic acid complementary to human PTPN2;
[0203] g. optionally, a second constitutive promoter; and
[0204] h. the nucleotide sequence encoding the priming receptor.

[0205] In some embodiments, the nucleic acid comprises a 5′ homology directed repair arm and a 3′ homology directed repair arm, both of which are complementary to an insertion site in a host cell chromosome.

[0206] In some embodiments, the nucleic acid comprises a woodchuck hepatitis virus post-translational regulatory element (WPRE).

[0207] In some embodiments, the WPRE is at the 3′ end of the nucleotide sequence encoding chimeric antigen receptor and at the 5′ end of the nucleotide sequence encoding priming receptor or wherein the WPRE is at the 3′ end of the nucleotide sequence encoding priming receptor and at the 5′ end of the nucleotide sequence encoding chimeric antigen receptor.

[0208] In some embodiments, the nucleic acid comprises synthetic polyA signal, an SV40 polyA signal, a human growth hormone (GH) polyA signal, or a bovine growth hormone (bGH) polyA signal.

[0209] In some embodiments, the nucleic acid is incorporated into an expression cassette or a vector for viral or non-viral delivery to a cell.

[0210] In some embodiments, the vector is for non-viral delivery and is, e.g., a non-viral vector.

[0211] In one aspect, provided herein are vectors comprising the nucleic acid disclosed herein.

[0212] In some embodiments, the 5′ and 3′ ends of the nucleic acid comprise nucleotide sequences that are homologous to genomic sequences flanking an insertion site in a genome of a primary cell.

[0213] In some embodiments, the insertion site is located at a genomic safe harbor (GSH) locus.

[0214] In some embodiments, the GSH locus is a GS94 locus (chr11: 128340000-128350000).

[0215] In some embodiments, the nucleotide sequences that are homologous to genomic sequences flanking the GS94 locus insertion site comprise nucleotides 24-473 and 7258-7707 of SEQ ID NO: 1120; nucleotides 24-473 and 7240-7689 of SEQ ID NO: 1121; nucleotides 24-473 and 7622-8071 of SEQ ID NO: 1122; nucleotides 24-473 and 7637-8086 of SEQ ID NO: 1123; or nucleotides 24-473 and 7622-8071 of SEQ ID NO: 1124.

[0216] In some embodiments, the nucleotide sequences that are homologous to genomic sequences flanking the GS94 locus insertion site comprise SEQ ID NOs: 1235 and 1236.

[0217] In some embodiments, nucleotide sequences comprise homology regions to the gRNA of the RNP complex used for inserting the nucleic acid into the genome of a cell.

[0218] In some embodiments, the sequences of the gRNA homology regions comprise SEQ ID NOs: 932 and 1237.

[0219] In one aspect, provided herein are isolated cells comprising:
[0220] a. the system disclosed herein;
[0221] b. at least one nucleic acid disclosed herein; and/or
[0222] c. the vector disclosed herein.

[0223] In some embodiments, the cell is an immune cell.

[0224] In one aspect, provided herein are isolated immune cells comprising:
[0225] a. the system disclosed herein;
[0226] b. at least one nucleic acid disclosed herein; and/or
[0227] c. the vector disclosed herein.

[0228] In some embodiments, the immune cell is a primary human immune cell.

[0229] In some embodiments, the primary immune cell is a natural killer (NK) cell, a T cell, a CD8+ T cell, a CD4+ T cell, a primary T cell, or a T cell progenitor.

[0230] In some embodiments, the primary immune cell is a primary T cell.

[0231] In some embodiments, the primary immune cell is a primary human T cell.

[0232] In one aspect, provided here are a population of isolated cells comprising a plurality of cells or immune cells disclosed herein.

[0233] In one aspect, provided here are pharmaceutical compositions comprising the isolated cells or immune cell disclosed herein or the population of isolated cells disclosed herein, and a pharmaceutically acceptable excipient.

[0234] In one aspect, provided here are pharmaceutical compositions comprising the nucleic acid disclosed herein or the vector disclosed herein, and a pharmaceutically acceptable excipient.

[0235] In one aspect, provided here are methods of editing a cell, comprising inserting the nucleic acid disclosed herein into a genome of the cell.

[0236] In some embodiments, the nucleic acid is inserted into a genomic safe harbor (GSH) locus.

[0237] In some embodiments, the GSH locus is a GS94 locus (chr11: 128340000-128350000).

[0238] In one aspect, provided here are methods of killing a target cell in a subject comprising administering the immune cell or population of immune cells disclosed herein to the subject, wherein the immune cell kills the target cell and/or triggers cytolysis of the target cell.

[0239] In one aspect, provided here are methods of inhibiting a target cell in a subject comprising administering the immune cell or population of immune cells disclosed herein to the subject, wherein the immune cell inhibits the target cell.

[0240] In some embodiments, the target cell expresses human TMRPSS4 or human TMPRSS4 and human SCL34A2.

[0241] In some embodiments, the target cell is a cancer cell.

[0242] In one aspect, provided here are methods of treating a disease in a human subject comprising administering the cells or immune cell or population of cells or immune cells disclosed herein or the pharmaceutical composition disclosed herein to the subject.

[0243] In some embodiments, the disease is cancer.

[0244] In one aspect, provided here are methods of treating cancer in a human subject, comprising administering the immune cell or population of immune cells disclosed herein or the pharmaceutical composition disclosed herein to the subject, wherein the immune cells are primary immune cells obtained from the subject.

[0245] In some embodiments, the cancer cells express human TMRPSS4 or human TMPRSS4 and human SCL34A2 on the cell membrane.

[0246] In one aspect, provided here are method of treating a disease in a subject comprising:
[0247] a. determining or having determined the presence of human SLC34A2-positive (SLC34A2+) cells in a cancer sample obtained from the subject; and/or
[0248] b. determining or having determined the presence of human TMPRSS4-positive (TMPRSS4+) cells in a cancer sample obtained from the subject; and
[0249] c. administering the cell or immune cell disclosed herein or the pharmaceutical composition disclosed herein to the subject.

[0250] In some embodiments, the cancer is a solid cancer or a liquid cancer.

[0251] In some embodiments, the cancer is non-small cell lung cancer (NSCLC), ovarian cancer, cervical cancer, endometrial cancer, uterine cancer, pancreatic cancer, esophageal cancer, head and neck squamous cell cancer, thyroid cancer, bladder cancer, breast cancer, cholangiocarcinoma cancer, colon cancer, rectal cancer, kidney cancer, renal cell carcinoma, prostate cancer, stomach cancer, or gastric cancer.

[0252] In some embodiments, the administration of the immune cell to the subject enhances an immune response in the subject or kills, or induces cytolysis, of the cancer cells.

[0253] In one aspect, provided here are methods of modulating the activity of a cell or immune cell comprising:
[0254] a. obtaining a cell or immune cell comprising
[0255] b. the system disclosed herein;
[0256] c. the nucleic acid disclosed herein; and/or
[0257] d. the vector disclosed herein; and
[0258] e. contacting the cell or immune cell with a target cell expressing SLC34A2 and TMPRSS4, wherein binding of the priming receptor to SLC34A2 on the target cell induces activation of the priming receptor and expression of the chimeric antigen receptor and wherein binding of the chimeric antigen receptor to TMPRSS4 on the target cell modulates the activity of the immune cell.

[0259] In some embodiments, the immune cell activity is cytolytic activity.

[0260] In some embodiments, the modulation of the immune cell activity comprises enhancing an immune response.

[0261] In some embodiments, the enhanced immune response is an adaptive immune response.

[0262] In some embodiments, the enhanced immune response is an innate immune response.

[0263] In some embodiments, the enhanced immune response is an increased expression of at least one cytokine or chemokine.

[0264] In some embodiments, the cytokine is interferon-gamma (IFNγ).

[0265] In some embodiments, the method comprises administering an immunotherapy to the subject concurrently with the cell or immune cell or subsequently to the cell or immune cell.

[0266] In one aspect, provided here are methods of inducing expression of a chimeric antigen receptor with a priming receptor in a cell comprising:
[0267] a. obtaining a cell or immune cell comprising
[0268] b. the system disclosed herein;
[0269] c. the nucleic acid disclosed herein; and/or
[0270] d. the vector disclosed herein; and
[0271] e. contacting the cell or immune cell with a cell expressing SLC34A2, wherein binding of the priming receptor to SLC34A2 on the cell induces activation of the priming receptor and expression of the chimeric antigen receptor.

[0272] In one aspect, provided here are nucleic acids comprising a nucleic acid sequence that has at least 80%, 85%, 90%, 91%, 92%, 93%, 94%, 95%, 96%, 97%, 98%, 99%, or 100% identity to SEQ ID NOs: 1120, 1121, 1122, 1123, 1124, 1238, 1239, 1240, 1241, or 1242, at least 80%, 85%, 90%, 91%, 92%, 93%, 94%, 95%, 96%, 97%, 98%, 99%, or 100% identity to a sequence comprising nucleotides 24-7707 of SEQ ID NO: 1120, at least 80%, 85%, 90%, 91%, 92%, 93%, 94%, 95%, 96%, 97%, 98%, 99%, or 100% identity to a sequence comprising nucleotides 24-7689 of SEQ ID NO: 1121, at least 80%, 85%, 90%, 91%, 92%, 93%, 94%, 95%, 96%, 97%, 98%, 99%, or 100% identity to a sequence comprising nucleotides 24-8071 of SEQ ID NO: 1122, at least 80%, 85%, 90%, 91%, 92%, 93%, 94%, 95%, 96%, 97%, 98%, 99%, or 100% identity to a sequence comprising nucleotides 24-8086 of SEQ ID NO: 1123, or at least 80%, 85%, 90%, 91%, 92%, 93%, 94%, 95%, 96%, 97%, 98%, 99%, or 100% identity to a sequence comprising nucleotides 24-8071 of SEQ ID NO: 1124; wherein the nucleic acid encodes a priming receptor comprising a first antigen binding domain that binds to SLC34A2 and a chimeric antigen receptor comprising a second antigen binding domain that binds to TMPRSS4.

[0273] In some embodiments, any difference in the nucleotide sequence as compared to SEQ ID NOs: 1120, 1121, 1122, 1123, 1124, 1238, 1239, 1240, 1241, 1242, or a sequence comprising nucleotides 24-7707 of SEQ ID NO: 1120, a sequence comprising nucleotides 24-7689 of SEQ ID NO: 1121, a sequence comprising nucleotides 24-8071 of SEQ ID NO: 1122, a sequence comprising nucleotides 24-8086 of SEQ ID NO: 1123, or a sequence comprising nucleotides 24-8071 of SEQ ID NO: 1124 does not affect the activity of any of the elements provided in Table 19.

[0274] In some embodiments, the nucleic acids comprise a sequence selected from the sequences as set forth in SEQ ID NOs: 1122, 1123, 1124, 1238, 1239, 1240, 1241, or 1242 or a sequence comprising nucleotides 24-7707 of SEQ ID NO: 1120, a sequence comprising nucleotides 24-7689 of SEQ ID NO: 1121, a sequence comprising nucleotides 24-8071 of SEQ ID NO: 1122, a sequence comprising nucleotides 24-8086 of SEQ ID NO: 1123, or a sequence comprising nucleotides 24-8071 of SEQ ID NO: 1124.

[0275] In one aspect, provided here are isolated human cells comprising the nucleic acid disclosed herein.

[0276] In some embodiments, the nucleic acid is inserted into a genomic safe harbor (GSH) locus of the cell.

[0277] In some embodiments, the GSH locus is a GS94 locus (chr11: 128340000-128350000).

[0278] In some embodiments, comprising a sequence selected from the sequences set forth in SEQ ID Nos: 1238, 1239, 1240, 1241 and 1242.

[0279] In one aspect, provided here are isolated human cells expressing a priming receptor comprising an antigen-binding domain that specifically binds to human SLC34A2 and a CAR comprising an antigen-binding domain that specifically binds to human TMPPRSS4, wherein binding of the priming receptor to SLC34A2 on the surface of a target cell and binding of the CAR to TMPRSS4 on the surface of a target cell induces lysis of the cell expressing TMPRSS4.

[0280] In some embodiments, where the cell expressing TMPRSS4 comprises SLC34A2 surface expression.

[0281] In one aspect, provided here are one or more nucleic acids comprising a nucleic acid sequence encoding a first cell surface receptor that specifically binds to human SLC34A2 and a nucleic acid sequence encoding a second cell surface receptor that specifically binds to human TMPRSS4, wherein binding of the first and second cell surface receptors to SLC34A2 and TMPRSS4 on the surface of a human cell, respectively, induces lysis of the human cell with TMPRSS4 on the surface.

[0282] In some embodiments, the first and the second cell surface receptor comprise the VH and VL of any of the SLC34A2 or TMPRSS4 antigen binding domains described herein, or their VH and VL CDRs.

### BRIEF DESCRIPTION OF THE DRAWINGS

[0283] These and other features, aspects, and advantages of the present invention will become better understood with regard to the following description, and accompanying drawings, where:

[0284] FIG. 1A shows binding of the indicated antibodies to TMPRSS4-expressing cells as determined by flow cytometry and measured by gMFI. FIG. 1B shows binding of TMPRSS4 antibodies to full-length catalytically inactive and truncated TMPRSS4 lacking the membrane-proximal domain as determined by flow cytometry and measured by gMFI. FIG. 1C shows flow cytometry histograms of binding of the TMPRSS4 antibodies to HEK293T cells engineered to express full length TMPRSS4 or parental HEK293T cells.

[0285] FIG. 2 is a schematic of an exemplary construct encoding a TMPRSS4 CAR.

[0286] FIG. 3A shows the percentages of T cells expressing CARs comprising the indicated TMPRSS4 antibodies as measured by flow cytometry (gMFI). FIG. 3B shows the overall expression of CARs comprising the indicated TMPRSS4 antibodies as measured by flow cytometry. FIG. 3C shows characterization of CD4+ cells into central memory T cells (T_{CM}), stem cell memory T cells (T_{SCM}), effector memory T cells (T_{EM}), or effector memory T cells re-expressing CD45RA (T_{EMRA}) based on flow cytometry detection of CCR7 and CD45RA. FIG. 3D shows characterization of CD8+ cells into T_{CM}, T_{SCM}, T_{EM}, or T_{EMRA} based on flow cytometry detection of CCR7 and CD45RA.

[0287] FIG. 4A shows surface expression of CD25 on T cells from donor CP5428 expressing CARs comprising the indicated TMPRSS4 antibodies. FIG. 4B shows surface expression of TIM3 on T cells from donor CP5428 expressing CARs comprising the indicated TMPRSS4 antibodies. FIG. 4C shows surface expression of CD25 on T cells from donor CP5917 expressing CARs comprising the indicated TMPRSS4 antibodies. FIG. 4D shows surface expression of TIM3 on T cells from donor CP5917 expressing CARs comprising the indicated TMPRSS4 antibodies.

[0288] FIG. 5A shows TMPRSS4 expression in LUDLU-1 and H1975 cell lines as determined by flow cytometry. FIG. 5B shows cytotoxicity (% killing) of LUDLU-1 and H1975 cell lines after incubation with TMPRSS4 CAR-expressing T cells at indicated effector: target (E:T) ratios.

[0289] FIG. 6A shows TMPRSS4 expression in H1975 cells with or without knockout of TMPRSS4 as determined by flow cytometry. FIG. 6B shows cytotoxicity (% killing) H1975 cells with or without knockout of TMPRSS4 after incubation with TMPRSS4 CAR-expressing T cells at indicated E:T ratios.

[0290] FIG. 7A shows secretion of IFNγ from TMPRSS4 CAR-expressing T cells following incubation with LUDLU-1 cells. FIG. 7B shows secretion of IFNγ from TMPRSS4 CAR-expressing T cells following incubation with parental H1975 cells. FIG. 7C shows secretion of IFNγ from TMPRSS4 CAR-expressing T cells following incubation with H1975 cells with TMPRSS4 knockout.

[0291] FIG. 8A shows secretion of TNFα from TMPRSS4 CAR-expressing T cells following incubation with LUDLU-1 cells. FIG. 8B shows secretion of TNFα from TMPRSS4 CAR-expressing T cells following incubation with parental H1975 cells. FIG. 8C shows secretion of TNFα from TMPRSS4 CAR-expressing T cells following incubation with H1975 cells with TMPRSS4 knockout.

[0292] FIG. 9 provides schematics of TMPRSS4 variants including the wild-type protein, a protein comprising a D290A mutation (indicated by X) that suppresses catalytic activity (“catalytic inactive”), and a truncated protein lacking the C-terminal serine protease domain (“cleaved/truncated”).

[0293] FIG. 10 shows CD69 surface expression in T cells expressing CARs comprising the indicated TMPRSS4 antibodies following co-culture with cells expressing the indicated TMPRSS4 protein.

[0294] FIG. 11 provides a schematic of the T cell engineering process and the first tier of the selection process.

[0295] FIG. 12 provides a schematic of functional sorting of T cells expressing a logic gate comprising an SLC34A2 primeR and a TMPRSS4 CAR following co-culture with indicated H1975 target cells.

[0296] FIG. 13A shows the percent knock-in (KI %) of genes in engineered T cells expressing a logic gate circuit in T cells from Donor A and Donor B. FIG. 13B shows the CAR expression/% KI (% conversion) of engineered T cells expressing a logic gate circuit in T cells from Donor A and Donor B. FIG. 13C shows the primeR expression in engineered T cells expressing a logic gate circuit in T cells from Donor A and Donor B.

[0297] FIG. 14 shows a schematic of the second tier of the selection process.

[0298] FIG. 15 shows SLC34A2 and TMPRSS4 expression in the indicated cell lines.

[0299] FIG. 16A shows the % killing (cytotoxicity) by engineered logic gate T cells from Donor B compared to the % killing (cytotoxicity) by engineered logic gate T cells from Donor A of TMPRSS4 knockout (KO) cells. FIG. 16B shows the % killing (cytotoxicity) by engineered logic gate T cells from Donor B compared to the % killing (cytotoxicity) by engineered logic gate T cells from Donor A of TMPRSS4^{hi} (high TMPRSS4 expression) cells. FIG. 16C shows the % killing (cytotoxicity) by engineered logic gate T cells from Donor B compared to the % killing (cytotoxicity) by engineered logic gate T cells from Donor A of SLC34A2^{hi} (high SLC34A2 expression)-TMPRSS4 knockout (KO) cells. FIG. 16D shows the % killing (cytotoxicity) by engineered logic gate T cells from Donor B compared to the % killing (cytotoxicity) by engineered logic gate T cells from Donor A of SLC34A2-TMPRSS4 expressing cells.

[0300] FIG. 17A shows IFNγ secretion by engineered T cells from donor A incubated with target cells expressing the TMPRSS4 protein. FIG. 17B shows IFNγ secretion by engineered T cells from donor B incubated with target cells expressing the TMPRSS4 protein.

[0301] FIG. 18A shows the result of the repetitive stimulation assay (RSA) of T cells from Donor A incubated with target cells expressing the TMPRSS4 protein. FIG. 18B shows the result of the RSA of T cells from Donor B incubated with target cells expressing the TMPRSS4 protein.

[0302] FIG. 19A shows a comparison of the % KI (cytotoxicity) by the engineered T cells from Donor A when incubated with cells expressing only TMPRSS4 (H1975-TMP^{hi}) as compared to the % KI (cytotoxicity) by the engineered T cells when incubated with cells expressing both SLC34A2 and TMPRSS4 (H975-dual). FIG. 19B shows a comparison of the % KI (cytotoxicity) by the engineered T cells from Donor B when incubated with cells expressing only TMPRSS4 (H1975-TMP^{hi}) as compared to the % KI (cytotoxicity) by the engineered T cells when incubated with cells expressing both SLC34A2 and TMPRSS4 (H1975-dual). The development candidates showed low % KI (cytotoxicity) when incubated with cells expressing only TMPRSS4 and high % KI (cytotoxicity) when incubated with cells expressing both SLC34A2 and TMPRSS4.

[0303] FIG. 20 shows the % cytotoxicity of T cells expressing the indicated logic gate when incubated with the indicated cell line.

[0304] FIG. 21 shows a schematic of the selection criteria for the lead logic gate candidates.

[0305] FIG. 22 shows additional characterization for leakiness and potency of the lead candidate logic gate T cells.

[0306] FIG. 23 shows the % cytotoxicity of T cells expressing the indicated logic gate when incubated with the indicated cell line.

[0307] FIG. 24 shows a diagram of exemplary logic gate circuits.

[0308] FIG. 25 shows binding of the indicated antibodies to cell expressing wild type and the D290A TMPRSS4 protein, as determined by flow cytometry and measured by gMFI.

[0309] FIG. 26A shows representative flow cytometry histograms of FAS (left panel) and TGFBR2 (right panel) expression in transgene-negative (PrimeR−) or transgene-positive (PrimeR+) T cells including the FAS/PTPN2/2xTFGBR2 shRNA module. PrimeR+ T cells showed reduced levels of FAS and TGFBR2 expression compared to PrimeR− T cells. FIG. 26B shows a Western blot image of PTPN2 expression in transgene-positive (PrimeR+) and transgene-negative (PrimeR−) T cells expressing the indicated logic gates including the FAS/PTPN2/2xTFGBR2 shRNA module. Transgene-positive T cells expressing the shRNA module had less PTPN2 expression as compared to transgene-negative T cells. FIG. 26C shows the quantified reduction of FAS (left), TGFBR2 (center), and PTPN2 expression (right) in engineered logic gate T cells expressing the indicated logic gate with the shRNA module. The data is presented as an average of 3 donors with standard deviation.

[0310] FIG. 27A shows cytotoxicity (% killing) of H2347 cells that endogenously express TMPRSS4 and SLC34A2 after incubation with the indicated engineered logic gate T cells at the indicated Effector: Target cell (E:T) ratios. FIG. 27B shows cytotoxicity (% killing) of H1648 cells that endogenously expresses TMPRSS4 and SLC34A2 after incubation with the indicated engineered logic gate T cells at the indicated E:T ratios. FIG. 27C shows the cytotoxicity (% killing) of H1975-SLC34A2/TMPRSS4 cells that expressed median levels of both target antigens after incubation with the indicated engineered logic gate T cells at the indicated E:T ratios

[0311] FIG. 28 shows quantification of the IFNγ production of the indicated logic gate T cells after incubation with a mixture of 786-O-SLC34A2 cells and aHEK293T-TMPRSS4 WT or HEK293T-TMPRSS4 D290A cells.

[0312] FIG. 29A shows a representative flow plot of priming receptor and CAR expression in the engineered logic gate T-cells after co-culture with a 786-O parental cell line that does not express SLC34A2 (left) and a SLC34A2 positive cell line (right). FIG. 29B shows prime antigen dependent % CAR expression induction (left) and CAR expression (mean fluorescent intensity, MFI) (right) for the indicated engineered logic gate T cells over time when co-cultured with a cell line expressing the SLC34A2 priming antigen. FIG. 29C shows representative flow plots of CAR and priming receptor expression in engineered logic gate T cells in an “ON” state (left) after co-culture with cells expressing the priming antigen (left, “ON” state) and after co-culture with cells lacking expression of the priming antigen (right, “OFF” state). FIG. 29D shows prime antigen dependent % CAR expression induction (left) and CAR expression (mean fluorescent intensity, MFI) (right) over time after removal of the priming antigen.

[0313] FIG. 30 shows long term cytotoxicity of T cells in a repetitive stimulation assay (RSA). The indicated logic gate T cells were incubated with a H1975-SLC34A2/TMPRSS4 overexpressing target cell line and rechallenged with new target cells over time. Lines indicate target cell restimulation times. Target cell killing was determined by measuring the fluorescence intensity of GFP expressed by the target cells.

[0314] FIG. 31A shows a priming antigen heterogeneity cytotoxicity assay, where the indicated logic gate T cells were incubated at a 1:1 E:T ratio with a mixture of H1975-EFG-SLC34A2/TMPRSS4 and H1975-EFG-TMPRSS4 cells at the indicated target cell heterogeneity ratios. FIG. 31B shows a priming antigen heterogeneity cytotoxicity assay, where the indicated logic gate T cells were incubated at a 1:3 E:T ratio with a mixture of H1975-EFG-SLC34A2/TMPRSS4 and H1975-EFG-TMPRSS4 cells at the indicated target cell heterogeneity ratios. FIG. 31C shows a priming antigen heterogeneity cytotoxicity assay, where the indicated logic gate T cells were incubated at a 1:9 E:T ratio with a mixture of H1975-EFG-SLC34A2/TMPRSS4 D20A and H1975-EFG-TMPRSS4 cells at the indicated target cell heterogeneity ratios.

[0315] FIG. 32 shows in vivo tumor-growth inhibition over time of H1975-nEFG-SLC43A2-TMPRSS4 lung adenocarcinoma tumors after treatment with the indicated logic gate T cells.

[0316] FIG. 33A shows in vivo tumor-growth inhibition over time of H1975 tumors expressing SLC34A2-TMPRSS4 in a dual flank lung adenocarcinoma xenograft model after treatment with the indicated logic gate T cells. FIG. 33B shows in vivo tumor-growth inhibition over time of tumors expressing only TMPRSS4 in a dual flank lung adenocarcinoma xenograft model after treatment with the indicated logic gate T cells.

[0317] FIG. 34A shows the % reduction of FAS expression by flow cytometry in LG 47 T cells expressing the indicated shRNA. FIG. 34B shows long term cytotoxicity of the indicated T cells in a repetitive stimulation assay (RSA), after incubation of the indicated logic gate T cells with a H1975-SLC34A2/TMPRSS4+FASL overexpressing target cell line and rechallenged with new target cells over time. Arrows indicate target cell restimulation times. FIG. 34C shows a representative histogram of Fas (left panel) and FasL (right panel) expression in the indicated cell lines. Batimastat treatment was used to inhibit cleavage of cell surface expressed FASL.

[0318] FIG. 35A shows long term cytotoxicity and T cell proliferation of the indicated T cells in a repetitive stimulation assay (RSA) after incubation of the indicated LG T cells with a K562-SLC34A2/TMPRSS4 target cell line and restimulated over time. Arrows indicate target cell restimulation times. T cell counts are shown in white shading with a solid line, target cell counts are shown in gray shading with a dotted line. FIG. 35B shows T cell proliferation across RSA rounds in the indicated logic gate T cells from 3 donors. Data for both is the mean with standard deviation across 3 donors.

[0319] FIG. 36A shows the % reduction of TGFBR2 expression by flow cytometry in T cells expressing the Logic Gate 47 priming receptor and CAR and the indicated shRNA. FIG. 36B shows quantification of phosphorylated SMAD (gMFI) in in transgene-positive (PrimeR+) and transgene-negative (PrimeR−) T cells expressing the Logic Gate 47 priming receptor and CAR and the indicated shRNA, with the addition of TGFβ (left) or without TGFβ (right). FIG. 36C shows long term cytotoxicity of the indicated T cells in a repetitive stimulation assay (RSA). The indicated logic gate T cells were incubated with a H1975-SLC34A2/TMPRSS4 overexpressing target cell line and rechallenged with new target cells over time. The T cells were restimulated with the target cells at times indicated by gray arrows.

[0320] FIG. 37 shows in vivo tumor-growth inhibition over time of H1975-nEFG-SLC43A2-TMPRSS4 lung adenocarcinoma tumors after treatment with the indicated logic gate T cells derived from two donors. The logic gate T cells expressed the full FAS/PTPN2/2xTGFBR2 shRNA, or a quad luciferase (quad luc) control shRNA module.

### DETAILED DESCRIPTION OF THE INVENTION

[0321] The present disclosure provides polypeptide systems of synthetic transcriptional modulators that comprise antigen binding domains that bind to SLC34A2 and synthetic immune receptors (e.g., CARs) that comprise antigen binding domains that bind to TMPRSS4. The present disclosure also provides nucleic acids encoding the systems, cells comprising the polypeptide systems, and methods of making and/or using the cells.

### Definitions

[0322] Terms used in the claims and specification are defined as set forth below unless otherwise specified.

[0323] It must be noted that, as used in the specification and the appended claims, the singular forms “a,” “an” and “the” include plural referents unless the context clearly dictates otherwise.

[0324] With regard to the binding of an antibody to a target molecule, the terms “bind,” “specific binding,” “specifically binds to,” “specific for,” “selectively binds,” and “selective for” a particular antigen (e.g., a polypeptide target) or an epitope on a particular antigen mean binding that is measurably different from a non-specific or non-selective interaction (e.g., with a non-target molecule). For example, an antibody that “selectively binds” or “specifically binds” an antigen is an antigen-binding moiety that binds the antigen with high affinity and does not significantly bind other unrelated antigens. Specific binding can be measured, for example, by measuring binding to a target molecule and comparing it to binding to a non-target molecule. Specific binding can also be determined by competition with a control molecule that mimics the epitope recognized on the target molecule. In that case, specific binding is indicated if the binding of the antibody to the target molecule is competitively inhibited by the control molecule.

[0325] “Affinity” refers to the strength of the sum total of non-covalent interactions between a single binding site of a molecule (e.g., an antibody or antigen binding protein) and its binding partner (e.g., an antigen or epitope). Unless indicated otherwise, as used herein, “affinity” refers to intrinsic binding affinity, which reflects a 1:1 interaction between members of a binding pair (e.g., antibody and antigen or epitope). The affinity of a molecule X for its partner Y can be represented by the dissociation equilibrium constant (KD). The kinetic components that contribute to the dissociation equilibrium constant are described in more detail below. Affinity can be measured by common methods known in the art, including, but not limited to, surface plasmon resonance (SPR) technology (e.g., BIACORE®) or biolayer interferometry (e.g., FORTEBIO®).

[0326] The term “complementarity determining region” “CDR,” as used herein, refers to each of the regions of an antibody variable domain which are hypervariable in sequence and/or form structurally defined loops (“hypervariable loops,” “hypervariable region,” or “HVR”). Generally, native four-chain antibodies comprise six CDRs; three in the VH (HCDR1/CDR-H1, HCDR2/CDR-H2, and HCDR3/CDR-H3), and three in the VL (LCDR1/CDR-L1, LCDR2/CDR-L2, and LCDR3/CDR-L3). With the exception of CDR1 in VH, CDRs generally comprise the amino acid residues that form the hypervariable loops. Complementarity determining regions (CDRs) are also referred to as “hypervariable regions” or “HVRs”, and these terms are used herein interchangeably in reference to portions of the variable region that form the antigen-binding regions. This particular region has been described by Kabat et al., U.S. Dept. of Health and Human Services, Sequences of Proteins of Immunological Interest (1983) and by Chothia et al., J Mol Biol 196:901-917 (1987), where the definitions include overlapping or subsets of amino acid residues when compared against each other. Nevertheless, application of either definition to refer to a CDR of an antibody or variants thereof is intended to be within the scope of the term as defined and used herein. The exact residue numbers which encompass a particular CDR will vary depending on the sequence and size of the CDR. Those skilled in the art can routinely determine which residues comprise a particular CDR given the variable region amino acid sequence of the antibody.

[0327] The amino acid sequence boundaries of a CDR can be determined by one of skill in the art using any of a number of known numbering schemes, including those described by Kabat et al., supra (“Kabat” numbering scheme); Al-Lazikani et al., 1997, J. Mol. Biol., 273:927-948 (“Chothia” numbering scheme); Martin (Enhanced Chothia) Abhinandan and Martin, Mol Immunol. 2008 August; 45(14):3832-9; MacCallum et al., 1996, J. Mol. Biol. 262:732-745 (“Contact” numbering scheme); Lefranc et al., Dev. Comp. Immunol., 2003, 27:55-77 (“IMGT” numbering scheme); and Honegger and Plückthun, J. Mol. Biol., 2001, 309:657-70 (“AHo” numbering scheme); each of which is incorporated by reference in its entirety.

[0328] Table 1 provides the positions of LCDR1/CDR-L1, LCDR2/CDR-L2, LCDR3/CDR-L3, HCDR1/CDR-H1, HCDR2/CDR-H2, and HCDR3/CDR-H3 as identified by the Kabat and Chothia schemes. For HCDR1/CDR-H1, residue numbering is provided using both the Kabat and Chothia numbering schemes.

[0329] CDRs may be assigned, for example, using antibody numbering software, such as Abnum, available at bioinf.org.uk/abs/abnum/, and described in Abhinandan and Martin, Immunology, 2008, 45:3832-3839, incorporated by reference in its entirety. Descriptions of the various antibody numbering schemes are available at bioinf.org.uk/abs/info.html and the AbYsis program.

TABLE 1
Residues in CDRs according to Kabat and Chothia numbering schemes.

| CDR | Kabat | Chothia | AbM | Contact | IMGT |
|---|---|---|---|---|---|
| L1 | L24-L34 | L24-L34 | L24-L34 | L30-L36 | L27-L32 |
| L2 | L50-L56 | L50-L56 | L50-L56 | L46-L55 | L50-L51 |
| L3 | L89-L97 | L89-L97 | L89-L97 | L89-L96 | L89-L97 |
| H1 (Kabat Numbering) | H31-H35B | H26-H32 or H34* | H26-H35B | H30-H35B | H26-H35B |
| H1 (Chothia/Martin | H31-H35 | H26-H32 | H26-H35 | H30-H35 | H26-H33 |
| Numbering) | | | | | |
| H2 | H50-H65 | H52-H56 | H50-H58 | H47-H58 | H51-H56 |
| H3 | H95-H102 | H95-H102 | H95-H102 | H93-H101 | H93-H102 |

*The C-terminus of CDR-H1, when numbered using the Kabat numbering convention, varies between H32 and H34, depending on the length of the CDR.

[0330] The “EU numbering scheme” is generally used when referring to a residue in an antibody heavy chain constant region (e.g., as reported in Kabat et al., supra). Unless stated otherwise, the EU numbering scheme is used to refer to residues in antibody heavy chain constant regions described herein.

TABLE 2
Example Conservative Substitutions

| | | Specific Example |
|---|---|---|
| Original | Example Substitutions | Substitutions |
| Ala (A) | Val, Leu, Ile | Val |
| Arg (R) | Lys, Gln, Asn | Lys |
| Asn (N) | Gln, His, Asp, Lys, Arg | Gln |
| Asp (D) | Glu, Asn | Glu |
| Cys (C) | Ser, Ala | Ser |
| Gln (Q) | Asn, Glu | Asn |
| Glu (E) | Asp, Gln | Asp |
| Gly (G) | Ala | Ala |
| His (H) | Asn, Gln, Lys, Arg | Arg |
| Ile (I) | Leu, Val, Met, Ala, Phe | Leu |
| Leu (L) | Norleucine, Ile, Val, Met, Ala | Ile |
| Lys (K) | Arg, Gln, Asn | Arg |
| Met (M) | Leu, Phe, Ile | Leu |
| Phe (F) | Leu, Val, Ile, Ala, Tyr | Tyr |
| Pro (P) | Ala | Ala |
| Ser (S) | Thr | Thr |
| Thr (T) | Ser | Ser |
| Trp (W) | Tyr, Phe | Tyr |
| Tyr (Y) | Trp, Phe, Thr, Ser | Phe |
| Val (V) | Ile, Leu, Met, Phe, Ala | Leu |

[0331] As used herein, the term “single-chain” refers to a molecule comprising amino acid monomers linearly linked by peptide bonds. In a particular such embodiment, the C-terminus of a Fab light chain is connected to the N-terminus of a Fab heavy chain in a single-chain Fab molecule. As described in more detail herein, an scFv has a variable domain of light chain (VL) connected from its C-terminus to the N-terminal end of a variable domain of heavy chain (VH) by a polypeptide chain or linker. Alternately an scFv comprises a polypeptide chain wherein the C-terminal end of a VH is connected to the N-terminal end of a VL by a polypeptide chain or linker.

[0332] The “Fab fragment” (also referred to as fragment antigen-binding) contains the constant domain (CL) of the light chain and the first constant domain (CH1) of the heavy chain along with the variable domains VL and VH on the light and heavy chains respectively. The variable domains comprise the complementarity determining loops (CDR, also referred to as hypervariable region) that are involved in antigen-binding. Fab′ fragments differ from Fab fragments by the addition of a few residues at the carboxy terminus of the heavy chain CH1 domain including one or more cysteines from the antibody hinge region.

[0333] “F(ab′)₂” fragments contain two Fab′ fragments joined, near the hinge region, by disulfide bonds. F(ab′)₂ fragments may be generated, for example, by recombinant methods or by pepsin digestion of an intact antibody. The F(ab′) fragments can be dissociated, for example, by treatment with β-mercaptoethanol.

[0334] “Fv” fragments comprise a non-covalently-linked dimer of one heavy chain variable domain and one light chain variable domain.

[0335] The “Single-chain Fv” or “scFv” includes the VH and VL domains of an antibody, wherein these domains are present in a single polypeptide chain. In one embodiment, the Fv polypeptide further comprises a polypeptide linker between the VH and VL domains which enables the scFv to form the desired structure for antigen-binding. For a review of scFv see Pluckthun in The Pharmacology of Monoclonal Antibodies, vol. 113, Rosenburg and Moore eds., Springer-Verlag, New York, pp. 269-315 (1994). HER2 antibody scFv fragments are described in WO93/16185; U.S. Pat. Nos. 5,571,894; and 5,587,458.

[0336] The term “single domain antibody” or “sdAb” refers to a molecule in which one variable domain of an antibody specifically binds to an antigen without the presence of the other variable domain. Single domain antibodies, and fragments thereof, are described in Arabi Ghahroudi et al., FEBS Letters, 1998, 414:521-526 and Muyldermans et al., Trends in Biochem. Sci., 2001, 26:230-245, each of which is incorporated by reference in its entirety. Single domain antibodies are also known as sdAbs or nanobodies. Sdabs are fairly stable and easy to express as fusion partner with the Fc chain of an antibody (Harmsen M M, De Haard H J (2007). “Properties, production, and applications of camelid single-domain antibody fragments”. Appl. Microbiol Biotechnol. 77(1): 13-22). As used herein, the term “single-chain” refers to a molecule comprising amino acid monomers linearly linked by peptide bonds. In a particular such embodiment, the C-terminus of the Fab light chain is connected to the N-terminus of the Fab heavy chain in the single-chain Fab molecule. As described in more detail herein, an scFv has a variable domain of light chain (VL) connected from its C-terminus to the N-terminal end of a variable domain of heavy chain (VH) by a polypeptide chain. Alternately the scFv comprises of polypeptide chain where in the C-terminal end of the VH is connected to the N-terminal end of VL by a polypeptide chain.

[0337] As used herein, the term “gene” refers to the basic unit of heredity, consisting of a segment of DNA arranged along a chromosome, which codes for a specific protein or segment of protein. A gene typically includes a promoter, a 5′ untranslated region, one or more coding sequences (exons), optionally introns, and a 3′ untranslated region. The gene may further comprise a terminator, enhancers and/or silencers.

[0338] The terms “genetic engineering,” “gene editing,” or “genome editing”, as used herein, refer to a type of genetic manipulation in which DNA is inserted, replaced, or removed from the genome using artificially manipulated nucleases or “molecular scissors”. It is a useful tool for elucidating the function and effect of sequence-specific genes or proteins or altering cell behavior (e.g., for therapeutic purposes).

[0339] Gene editing, as contemplated herein, may involve a gene (or nucleotide sequence) knock-in or knock-out. As used herein, the term “knock-in” refers to an addition of a DNA sequence, or fragment thereof into a genome. Such DNA sequences to be knocked-in may include an entire gene or genes, may include regulatory sequences associated with a gene or any portion or fragment of the foregoing. For example, a polynucleotide donor construct encoding a recombinant protein may be inserted into the genome of a cell carrying a mutant gene. In some embodiments, a knock-in strategy involves substitution of an existing sequence with the provided sequence, e.g., substitution of a mutant allele with a wild-type copy. On the other hand, the term “knock-out” refers to the elimination of a gene or the expression of a gene. For example, a gene can be knocked out by either a deletion or an addition of a nucleotide sequence that leads to a disruption of the reading frame. As another example, a gene may be knocked out by replacing a part of the gene with an irrelevant (e.g., non-coding) sequence.

[0340] Currently available genome editing tools include zinc finger nucleases (ZFN) and transcription activator-like effector nucleases (TALENs) to incorporate genes at safe harbor loci (e.g., the adeno-associated virus integration site 1 (AAVS1) safe harbor locus or any other safe harbor loci disclosed herein). The DICE (dual integrase cassette exchange) system utilizing phiC31 integrase and Bxb1 integrase is a tool for target integration. Additionally, clustered regularly interspaced short palindromic repeat/Cas (CRISPR/Cas) techniques can be used for targeted gene insertion. Site specific gene editing approaches can include homology dependent mechanisms or homology independent mechanisms. All methods known in the art for targeted insertion of gene sequences are contemplated in the methods described herein to insert constructs at gene targets or safe harbor loci.

[0341] The “CRISPR/Cas” system refers to a widespread class of bacterial systems for defense against foreign nucleic acid. CRISPR/Cas systems are found in a wide range of eubacterial and archaeal organisms. CRISPR/Cas systems include type I, II, and III sub-types. Wild-type type II CRISPR/Cas systems utilize an RNA-mediated nuclease, Cas9 in complex with guide and activating RNA to recognize and cleave foreign nucleic acid. Guide RNAs having the activity of both a guide RNA and an activating RNA are also known in the art. In some cases, such dual activity guide RNAs are referred to as a small guide RNA (sgRNA).

[0342] As used herein, a polypeptide referred to as a “Cas endonuclease” or having “Cas endonuclease activity” refers to a CRISPR-related (Cas) polypeptide encoded by a Cas gene, wherein a Cas polypeptide is a target DNA sequence that can be cleaved when operably linked to one or more guide polynucleotides (see, e.g., U.S. Pat. No. 8,697,359). Also included in this definition are variants of Cas endonuclease that retain guide polynucleotide-dependent endonuclease activity. The Cas endonuclease used in the donor DNA insertion method detailed herein is an endonuclease that introduces double-strand breaks into DNA at the target site (e.g., within the target locus or at the safe harbor site).

[0343] As used herein, the term “Cas9” refers to an RNA-mediated nuclease (e.g., of bacterial or archeal origin, or derived therefrom). Exemplary RNA-mediated nucleases include the foregoing Cas9 proteins and homologs thereof, and include but are not limited to, CPF1 (See, e.g., Zetsche et al., Cell, Volume 163, Issue 3, p759-771, 22 Oct. 2015). Similarly, as used herein, the term “Cas9 ribonucleoprotein” complex and the like refers to a complex between the Cas9 protein, and a crRNA (e.g., guide RNA or small guide RNA), the Cas9 protein and a trans-activating crRNA (tracrRNA), the Cas9 protein and a small guide RNA, or a combination thereof (e.g., a complex containing the Cas9 protein, a tracrRNA, and a crRNA guide RNA). Cas9 homologs are found in a wide variety of eubacteria, including, but not limited to bacteria of the following taxonomic groups: Actinobacteria, Aquificae, Bacteroidetes-Chlorobi, Chlamydiae-Verrucomicrobia, Chlroflexi, Cyanobacteria, Firmicutes, Proteobacteria, Spirochaetes, and Thermotogae. An exemplary Cas9 protein is the Streptococcus pyogenes Cas9 protein. Additional Cas9 proteins and homologs thereof are described in, e.g., Chylinksi, et al., RNA Biol. 2013 May 1; 10(5):726-737; Nat. Rev. Microbiol. 2011 June; 9 (6): 467-477; Hou, et al., Proc Natl Acad Sci USA. 2013 Sep. 24; 110(39):15644-9; Sampson et al., Nature. 2013 May 9; 497(7448):254-7; and Jinek, et al., Science. 2012 Aug. 17; 337(6096):816-21. The Cas9 nuclease domain can be optimized for efficient activity or enhanced stability in the host cell.

[0344] As used herein, the term “guide polynucleotide” relates to a polynucleotide sequence capable of complexing with a Cas endonuclease and allowing the Cas endonuclease to recognize and cleave a DNA target site. The guide polynucleotide can be a single molecule or a double molecule. The guide polynucleotide sequence can be an RNA sequence, a DNA sequence, or a combination thereof (RNA-DNA combination sequence). A guide polynucleotide comprising only ribonucleic acid is also referred to as “guide RNA”. In some embodiments, a polynucleotide donor construct is inserted at a safe harbor locus using a guide RNA (gRNA) in combination with a Cas endonuclease (e.g., Cas9 endonuclease).

[0345] As used herein, the term “homology directed repair” or HDR refers to a cellular process in which cut or nicked ends of a DNA strand are repaired by polymerization from a homologous template nucleic acid. Thus, the original sequence is replaced with the sequence of the template. The homologous template nucleic acid can be provided by homologous sequences elsewhere in the genome (sister chromatids, homologous chromosomes, or repeated regions on the same or different chromosomes). Alternatively, an exogenous template nucleic acid can be introduced to obtain a specific HDR-induced change of the sequence at the target site. In this way, specific mutations can be introduced at the cut site.

[0346] As used herein, the term “non-homologous end joining” or NHEJ refers to a cellular process in which cut or nicked ends of a DNA strand are directly ligated without the need for a homologous template nucleic acid. NHEJ can lead to the addition, the deletion, substitution, or a combination thereof, of one or more nucleotides at the repair site.

[0347] As used herein, the term “integration” refers to the process of stably inserting one or more nucleotides of a construct into the cell genome, i.e., covalently linking to a nucleic acid sequence in the chromosomal DNA of the cell. It may also refer to nucleotide deletions at a site of integration. Where there is a deletion at the insertion site, “integration” may further include substitution of the endogenous sequence or nucleotide deleted with one or more inserted nucleotides.

[0348] As used herein, the term “locus” refers to a specific, fixed physical location on a chromosome where a gene or genetic marker is located.

[0349] The term “safe harbor locus” refers to a locus at which genes or genetic elements can be incorporated without disruption to expression or regulation of adjacent genes. These safe harbor loci are also referred to as safe harbor sites (SHS) or genomic safe harbor (GSH) sites. As used herein, a safe harbor locus refers to an “integration site” or “knock-in site” at which a sequence encoding a transgene, as defined herein, can be inserted. In some embodiments the insertion occurs with replacement of a sequence that is located at the integration site. In some embodiments, the insertion occurs without replacement of a sequence at the integration site. Examples of integration sites contemplated are provided in Table 9.

[0350] A “chemotherapeutic agent” refers to a chemical compound useful in the treatment of cancer. Chemotherapeutic agents include “anti-hormonal agents” or “endocrine therapeutics” which act to regulate, reduce, block, or inhibit the effects of hormones that can promote the growth of cancer.

[0351] The term “sufficient amount” means an amount sufficient to produce a desired effect, e.g., an amount sufficient to modulate protein aggregation in a cell.

[0352] The term “therapeutically effective amount” is an amount that is effective to ameliorate a symptom of a disease.

[0353] As used herein, the term “treating” includes any effect, e.g., lessening, reducing, modulating, ameliorating or eliminating, that results in the improvement of the condition, disease, disorder, and the like, or ameliorating a symptom thereof.

[0354] As used herein, the term “complementary” or “complementarity” refers to specific base pairing between nucleotides or nucleic acids. Complementary nucleotides are, generally, A and T (or A and U), and G and C. The guide RNAs described herein can comprise sequences, for example, DNA targeting sequence that are perfectly complementary or substantially complementary (e.g., having 1-4 mismatches) to a genomic sequence in a cell.

[0355] The term “composition” refers to a mixture that contains, e.g., an engineered cell or protein contemplated herein. In some embodiments, the composition may contain additional components, such as adjuvants, stabilizers, excipients, and the like. The term “composition” or “pharmaceutical composition” refers to a preparation which is in such form as to permit the biological activity of an active ingredient contained therein to be effective in treating a subject, and which contains no additional components which are unacceptably toxic to the subject in the amounts provided in the pharmaceutical composition.

[0356] As used herein, the term “developmental cell states” refers to, for example, states when the cell is inactive, actively expressing, differentiating, senescent, etc. developmental cell state may also refer to a cell in a precursor state (e.g., a T cell precursor).

[0357] The term “ameliorating” refers to any therapeutically beneficial result in the treatment of a disease state, e.g., a cancer disease state, lessening in the severity or progression, remission, or cure thereof.

[0358] As used herein, the term “effective amount” refers to the amount of a compound (e.g., a compositions described herein, cells described herein) sufficient to effect beneficial or desired results. An effective amount can be administered in one or more administrations, applications or dosages and is not intended to be limited to a particular formulation or administration route.

[0359] As used herein the term “expression cassette” is a polynucleotide construct, generated recombinantly or synthetically, comprising regulatory sequences operably linked to a selected polynucleotide to facilitate expression of the selected polynucleotide in a host cell. For example, the regulatory sequences can facilitate transcription of the selected polynucleotide in a host cell, or transcription and translation of the selected polynucleotide in a host cell. An expression cassette can, for example, be integrated in the genome of a host cell or be present in an expression vector.

[0360] As used, the term “encoding” refers to a sequence of nucleotides which codes for a protein or polypeptide of interest or non-protein coding sequences. The nucleic acid sequence may be either a molecule of DNA or RNA. In preferred embodiments, the molecule is a DNA molecule. In other preferred embodiments, the molecule is a RNA molecule. When present as a RNA molecule, it will comprise sequences which direct the ribosomes of the host cell to start translation (e.g., a start codon, ATG) and direct the ribosomes to end translation (e.g., a stop codon). Between the start codon and stop codon is an open reading frame (ORF). Such terms are known to one of ordinary skill in the art. Non-protein coding sequences include, but are not limited to, short hairpin RNA (shRNA), small interfering RNA (siRNA), double stranded RNA (dsRNA), or antisense oligonucleotides.

[0361] As used herein, a single-stranded DNA template or a double-stranded DNA template refers to a DNA oligonucleotide that can be used by a cell as a template for HDR. Generally, the single-stranded DNA template or a double-stranded DNA template has at least one region of homology to a target site. In some cases, the single-stranded DNA template or double-stranded DNA template has two homologous regions flanking a region that contains a heterologous sequence to be inserted at a target cut site.

[0362] The term percent “identity,” in the context of two or more nucleic acid or polypeptide sequences, refer to two or more sequences or subsequences that have a specified percentage of nucleotides or amino acid residues that are the same, when compared and aligned for maximum correspondence, as measured using one of the sequence comparison algorithms described below (e.g., BLASTP and BLASTN or other algorithms available to persons of skill) or by visual inspection. Depending on the application, the percent “identity” can exist over a region of the sequence being compared, e.g., over a functional domain, or, alternatively, exist over the full length of the two sequences to be compared.

[0363] For sequence comparison, typically one sequence acts as a reference sequence to which test sequences are compared. When using a sequence comparison algorithm, test and reference sequences are input into a computer, subsequence coordinates are designated, if necessary, and sequence algorithm program parameters are designated. The sequence comparison algorithm then calculates the percent sequence identity for the test sequence(s) relative to the reference sequence, based on the designated program parameters.

[0364] Optimal alignment of sequences for comparison can be conducted, e.g., by the local homology algorithm of Smith & Waterman, Adv. Appl. Math. 2:482 (1981), by the homology alignment algorithm of Needleman & Wunsch, J. Mol. Biol. 48:443 (1970), by the search for similarity method of Pearson & Lipman, Proc. Nat'l. Acad. Sci. USA 85:2444 (1988), by computerized implementations of these algorithms (GAP, BESTFIT, FASTA, and TFASTA in the Wisconsin Genetics Software Package, Genetics Computer Group, 575 Science Dr., Madison, Wis.), or by visual inspection (see generally Ausubel et al., infra).

[0365] One example of an algorithm that is suitable for determining percent sequence identity and sequence similarity is the BLAST algorithm, which is described in Altschul et al., J. Mol. Biol. 215:403-410 (1990). Software for performing BLAST analyses is publicly available through the National Center for Biotechnology Information (www.ncbi.nlm.nih.gov/).

[0366] As used herein, the term “to insert” or “inserting” refers to process of integrating a nucleotide sequence into the genome of a cell, such as at a target locus or safe harbor site. The term “insert” also can be used to refer to the genes or genetic elements that are incorporated at the target locus or safe harbor site using, for example, homology-directed repair (HDR) CRISPR/Cas (e.g., CRISPR/Cas9) genome-editing or other methods for inserting nucleotide sequences into a genomic region known to those of ordinary skill in the art.

[0367] As used herein, the phrase “introducing” in the context of introducing into a cell a nucleic acid or a complex comprising a nucleic acid, for example, an RNP-DNA template complex, refers to the translocation of the nucleic acid sequence or the RNP-DNA template complex from outside a cell to inside the cell. In some cases, introducing refers to translocation of the nucleic acid or the complex from outside the cell to inside the nucleus of the cell. Various methods of such translocation are contemplated, including but not limited to, electroporation, contact with nanowires or nanotubes, receptor mediated internalization, translocation via cell penetrating peptides, liposome mediated translocation, and the like.

[0368] As used herein, the term “operably linked” or “operatively linked” refers to the binding of a nucleic acid sequence to a single nucleic acid fragment such that one function is affected by the other. For example, if a promoter is capable of affecting the expression of a coding sequence or functional RNA (i.e., the coding sequence or functional RNA is under transcriptional control by the promoter), the promoter is operably linked thereto. Coding sequences can be operably linked to control sequences in both sense and antisense orientation.

[0369] As used herein, a “polynucleotide donor construct” refers to a nucleotide sequence (e.g., DNA sequence) that is genetically inserted into a polynucleotide and is exogenous to that polynucleotide. The polynucleotide donor construct is transcribed into RNA and optionally translated into a polypeptide. The polynucleotide donor construct can include prokaryotic sequences, cDNA from eukaryotic mRNA, genomic DNA sequences from eukaryotic (e.g., mammalian) DNA, and synthetic DNA sequences. For example, the polynucleotide donor construct can be a miRNA, shRNA, natural polypeptide (i.e., a naturally occurring polypeptide) or fragment thereof or a variant polypeptide (e.g., a natural polypeptide having less than 100% sequence identity with the natural polypeptide) or fragments thereof.

[0370] As used herein, the term “promoter” refers to a nucleotide sequence (e.g., DNA sequence) capable of controlling the expression of a coding sequence or functional RNA. The promoter sequence consists of proximal and more distal upstream elements, the latter elements often referred to as enhancers. A promoter can be derived from natural genes in its entirety, can be composed of different elements from different promoters found in nature, and/or may comprise synthetic DNA segments. A promoter, as contemplated herein, can be endogenous to the cell of interest or exogenous to the cell of interest. It is appreciated by those skilled in the art that different promoters can induce gene expression in different tissue or cell types, or at different developmental stages, or in response to different environmental conditions. As is known in the art, a promoter can be selected according to the strength of the promoter and/or the conditions under which the promoter is active, e.g., constitutive promoter, strong promoter, weak promoter, inducible/repressible promoter, tissue specific or developmentally regulated promoters, cell cycle-dependent promoters, and the like.

[0371] A promoter can be an inducible promoter (e.g., a heat shock promoter, tetracycline-regulated promoter, steroid-regulated promoter, metal-regulated promoter, estrogen receptor-regulated promoter, etc.). In some embodiments, an inducible promoter comprises one or more inducible response elements (e.g., Hepatocyte Nuclear Factor 1α (HNF1α) response elements) operably linked to a basal promoter element (e.g., a YB-TATA promoter). The promoter can be a constitutive promoter (e.g., CMV promoter, UBC promoter). In some embodiments, the promoter can be a spatially restricted and/or temporally restricted promoter (e.g., a tissue specific promoter, a cell type specific promoter, etc.). See for example US Publication 2018/0127786, the disclosure of which is herein incorporated by reference in its entirety.

[0372] As used herein, the term “transgene” refers to a polynucleotide that has been transferred naturally, or by any of a number of genetic engineering techniques from one organism to another. It is optionally translated into a polypeptide. It is optionally translated into a recombinant protein. A “recombinant protein” is a protein encoded by a gene-recombinant DNA—that has been cloned in a system that supports expression of the gene and translation of messenger RNA (see expression system). The recombinant protein can be a therapeutic agent, e.g., a protein that treats a disease or disorder disclosed herein. As used, transgene can refer to a polynucleotide that encodes a polypeptide.

[0373] The terms “vector” and “plasmid” are used interchangeably and as used herein refer to polynucleotide vehicles useful to introduce genetic material into a cell. Vectors can be linear or circular. Vectors can integrate into a target genome of a host cell or replicate independently in a host cell. Vectors can comprise, for example, an origin of replication, a multicloning site, and/or a selectable marker. An expression vector typically comprises an expression cassette. Vectors and plasmids include, but are not limited to, integrating vectors, prokaryotic plasmids, eukaryotic plasmids, plant synthetic chromosomes, episomes, cosmids, and artificial chromosomes.

[0374] The term “in vivo” refers to processes that occur in a living organism.

[0375] The term “in situ” refers to processes that occur in a living cell growing separate from a living organism, e.g., growing in tissue culture.

[0376] As used herein, the term “ex vivo” generally includes experiments or measurements made in or on living tissue, preferably in an artificial environment outside the organism, preferably with minimal differences from natural conditions.

[0377] As used herein, the phrase “hematopoietic stem cell” refers to a type of stem cell that can give rise to a blood cell. Hematopoietic stem cells can give rise to cells of the myeloid or lymphoid lineages, or a combination thereof. Hematopoietic stem cells are predominantly found in the bone marrow, although they can be isolated from peripheral blood, or a fraction thereof. Various cell surface markers can be used to identify, sort, or purify hematopoietic stem cells. In some cases, hematopoietic stem cells are identified as c-Kit⁺ and lin. In some cases, human hematopoietic stem cells are identified as CD34⁺, CD59⁺, Thy1/CD90⁺, CD38^{lo/-}, C-kit/CD117⁺, lin. In some cases, human hematopoietic stem cells are identified as CD34⁻, CD59⁺, Thy1/CD90⁺, CD38^{lo/-}, C-kit/CD117⁺, lin⁻. In some cases, human hematopoietic stem cells are identified as CD133⁺, CD59⁺, Thy1/CD90⁺, CD38^{lo/-}, C-kit/CD117⁺, lin⁻. In some cases, mouse hematopoietic stem cells are identified as CD34^{lo/-}, SCA-1⁺, Thy1^{+/lo}, CD38⁺, C-kit⁺, lin⁻. In some cases, the hematopoietic stem cells are CD150⁺CD48⁻CD244⁻.

[0378] As used herein, the phrase “hematopoietic cell” refers to a cell derived from a hematopoietic stem cell. The hematopoietic cell may be obtained or provided by isolation from an organism, system, organ, or tissue (e.g., blood, or a fraction thereof). Alternatively, an hematopoietic stem cell can be isolated and the hematopoietic cell obtained or provided by differentiating the stem cell. Hematopoietic cells include cells with limited potential to differentiate into further cell types. Such hematopoietic cells include, but are not limited to, multipotent progenitor cells, lineage-restricted progenitor cells, common myeloid progenitor cells, granulocyte-macrophage progenitor cells, or megakaryocyte-erythroid progenitor cells. Hematopoietic cells include cells of the lymphoid and myeloid lineages, such as lymphocytes, erythrocytes, granulocytes, monocytes, and thrombocytes.

[0379] As used herein, the phrase “immune cell” is inclusive of all cell types that can give rise to immune cells, including hematopoietic cells such hematopoietic stem cells, pluripotent stem cells, and induced pluripotent stem cells (iPSCs). In some embodiments, the immune cell is a B cell, macrophage, a natural killer (NK) cell, an induced pluripotent stem cell (iPSC), a human pluripotent stem cell (HSPC), a T cell or a T cell progenitor or dendritic cell. In some embodiments, the cell is an innate immune cell.

[0380] As used herein, the terms “T lymphocyte” and “T cell” are used interchangeably and refer to cells that have completed maturation in the thymus, and identify certain foreign antigens in the body. The terms also refer to the major leukocyte types that have various roles in the immune system, including activation and deactivation of other immune cells. The T cell can be any T cell such as a cultured T cell, e.g., a primary T cell, or a T cell derived from a cultured T cell line, e.g., a Jurkat, SupT1, etc., or a T cell obtained from a mammal. T cells include, but are not limited to, naïve T cells, stimulated T cells, primary T cells (e.g., uncultured), cultured T cells, immortalized T cells, helper T cells, cytotoxic T cells, memory T cells, regulatory T cells, natural killer T cells, combinations thereof, or sub-populations thereof. The T cell can be a CD3⁺ cell. T cells can be CD4⁺, CD8⁺, or CD4⁺ and CD8⁺. The T cell can be any type of T cell, CD4⁺/CD8⁺ double positive T cells, CD4⁺ helper T cells (e.g., T_{H}1 and T_{H}2 cells), CD8⁺ T cells (e.g., cytotoxic T cells), peripheral blood mononuclear cells (PBMC), peripheral blood leukocytes (PBL), tumor infiltrating lymphocytes (TIL), memory T cells, naive T cells, regulatory T cells, γδ T cells, etc. It can be any T cell at any stage of development. Additional types of helper T cells include T_{H}3 (Treg) cells, T_{H}17 cells, T_{H}9 cells, or T_{FH} cells. Additional types of memory T cells include cells such as central memory T cells (T_{CM} cells), stem cell memory T cells (T_{SCM} cells), effector memory T cells (T_{EM} cells and T_{EMRA} cells). A T cell can also refer to a genetically modified T cell, such as a T cell that has been modified to express a T cell receptor (TCR) or a chimeric antigen receptor (CAR). T cells can also be differentiated from stem cells or progenitor cells.

[0381] “CD4⁺ T cells” refers to a subset of T cells that express CD4 on their surface and are associated with a cellular immune response. CD4⁺ T cells are characterized by a post-stimulation secretion profile that can include secretion of cytokines such as IFN-γ, TNF-α, IL-2, IL-4 and IL-10. “CD4” is a 55 kD glycoprotein originally defined as a differentiation antigen on T lymphocytes, but was also found on other cells including monocytes/macrophages. The CD4 antigen is a member of the immunoglobulin superfamily and has been implicated as an associative recognition element in MHC (major histocompatibility complex) class II restricted immune responses. On T lymphocytes, the CD4 antigen defines a helper/inducer subset.

[0382] “CD8⁺ T cells” refers to a subset of T cells that express CD8 on their surface, are MHC class I restricted, and function as cytotoxic T cells. The “CD8” molecule is a differentiation antigen present on thymocytes, as well as on cytotoxic and suppressor T lymphocytes. The CD8 antigen is a member of the immunoglobulin superfamily and is an associative recognition element in major histocompatibility complex class I restriction interactions.

[0383] As used herein, the term “primary” in the context of a primary cell or primary stem cell refers to a cell that has not been transformed or immortalized. Such primary cells can be cultured, sub-cultured, or passaged a limited number of times (e.g., cultured 0, 1, 2, 3, 4, 5, 6, 7, 8, 9, 10, 11, 12, 13, 14, 15, 16, 17, 18, 19, or 20 times). In some cases, the primary cells are adapted to in vitro culture conditions. In some cases, the primary cells are isolated from an organism, system, organ, or tissue, optionally sorted, and utilized, e.g., directly without culturing or sub-culturing. In some cases, the primary cells are stimulated, activated, or differentiated. For example, primary T cells can be activated by contact with (e.g., culturing in the presence of) CD3, CD28 agonists, IL-2, IFNγ, or a combination thereof.

[0384] As used herein, the term “exogenous” in the context of an element in a cell refers to an element, e.g., a molecule or activity, that has been introduced into a host cell and is not native to that cell. The molecule can be introduced, for example, by introduction of the encoding nucleic acid into host genetic material, such as by integration into a host chromosome, or as non-chromosomal genetic material, such as a plasmid. Thus, the term, when used in connection with expression of an encoding nucleic acid, refers to the introduction of the encoding nucleic acid into a cell in an expressible form. The term “endogenous” refers to a molecule or activity that is present in a host cell under natural, unedited conditions. Similarly, the term, when used in connection with expression of the encoding nucleic acid, refers to expression of the encoding nucleic acid that is contained within the cell and not introduced exogenously.

[0385] The term “heterologous” in the context of a nucleic acid refers to a nucleic acid or polypeptide sequence or domain which is not native to a flanking sequence, e.g., wherein the heterologous sequence is not found in nature coupled to the nucleic acid or polypeptide sequences occurring at one or both ends.

[0386] The term “homologous” in the context of a nucleic acid refers to a nucleic acid or polypeptide sequence or domain which is native to a flanking sequence, e.g., wherein the homologous sequence is found in nature coupled to the nucleic acid or polypeptide sequences occurring at one or both ends.

[0387] The terms “increase” and “activate” refer to an increase of 10%, 20%, 30%, 40%, 50%, 60%, 70%, 75%, 80%, 85%, 90%, 95%, 100%, 2-fold, 3-fold, 4-fold, 5-fold, 10-fold, 20-fold, 50-fold, 100-fold, or greater in a recited variable.

[0388] The term “mammal” as used herein includes both humans and non-humans and include but is not limited to humans, non-human primates, canines, felines, murines, bovines, equines, and porcines.

[0389] The terms “modulate” and “modulation” refer to reducing or inhibiting or, alternatively, activating or increasing, a recited variable.

[0390] The terms “protein,” “polypeptide,” and “peptide” are used herein interchangeably.

[0391] The terms “reduce” and “inhibit” refer to a decrease of 10%, 20%, 30%, 40%, 50%, 60%, 70%, 75%, 80%, 85%, 90%, 95%, 2-fold, 3-fold, 4-fold, 5-fold, 10-fold, 20-fold, 50-fold, 100-fold, or greater in a recited variable.

[0392] As used herein, the term “subject” refers to a human subject. In some embodiments the subject has a disease or condition that can be treated with an engineered cell provided herein or population thereof. In some aspects, the disease or condition is a cancer.

[0393] Certain amino acids of a protein can be modified post-transcriptionally and the amino acid sequences provided herein include amino acids that contain a post-translational modification, e.g., deamidation, glycosylation, formation of pyroglutamate, and deletion of C-terminal lysine or other amino acids. For heavy or light chains or their VH or VL domains disclosed herein that have an N-terminal glutamine (Q) or glutamic acid/glutamate (E), the N-terminal Q or E can be replaced by a pyro-glutamate. Accordingly, any VH or VL amino acid sequence disclosed herein having a Q or an E as N-terminal amino acid sequence should be understood to encompass those in which the Q or E is replaced by a pyro-glutamate. Also provided are compositions comprising proteins comprising an N-terminal VH or VL having an N-terminal Q or E, wherein at least about 10%, 20%, 30%, 40%, 50%, 60%, 70%, 80%, 90% or 95% of the proteins in the composition have a pyro-glutamate at the N-terminal amino acid of the VH and/or VL.

### TMPRSS4 Antigen Binding Domains

[0394] In some aspects, provided herein are antigen binding domains (e.g., antibodies or antigen binding fragments thereof) that bind to TMPRSS4. In some aspects, provided herein are means for binding to TMPRSS4. In some embodiments, the means for binding to TMPRSS4 comprises an antibody or antigen-binding fragment provided herein. In some embodiments, a TMPRSS4 antibody or antigen-binding fragment or equivalent thereof comprises means for binding a TMPRSS4 protein, optionally binding a human TMPRSS4 protein in the region(s) of human TMPRSS4 bound by the TMPRSS4 antigen binding domains (e.g., an antibody or antigen binding fragment thereof as described in the Examples below). In some embodiments, the means binds a TMPRSS4 protein. In some embodiments, the means binds a human TMPRSS4 protein (e.g., the TMPRSS4 protein of SEQ ID NO: 960) and related isoforms and orthologs. In some embodiments, the means is a TMPRSS4 antibody or antigen-binding fragment or equivalent thereof (e.g., a full length antibody or a F(ab′)₂ fragment, a Fab fragment, a single chain variable fragment (scFv), and a single domain antibody (sdAb), or a functional fragment thereof) means for binding a TMPRSS4 protein. In some embodiments, the means for binding TMPRSS4 includes the anti-TMPRSS4 antibodies and antigen-binding fragments or equivalents thereof described herein.

[0395] Transmembrane protease, serine 4 (TMPRSS4 HGNC: 11878, NCBI Entrez Gene: 56649; UniProtKB/Swiss-Prot: Q9NRS4), otherwise known as Transmembrane Serine Protease 4; Membrane-Type Serine Protease 2 (MT-SP2); Channel-Activating Serine Protease 2 (CAP2); Type II Membrane Serine Protease; or CAPH2, is a 48 kDa transmembrane glycoprotein that belongs to the serine protease family of proteins, a promoter of cancer cell invasion. The canonical isoform encodes a type II single pass transmembrane protein with a 384 amino acid extracellular C-terminal domain. An autocatalytic event has been reported to induce self-cleavage between amino acids 204 and 205, resulting in a 150 amino acid extracellular region.

[0396] The amino acid and nucleic acid sequences of TMPRSS4 are provided below in Table 3, as well as the amino acid sequences of a catalytically inactive TMPRSS4 (comprising a D290A mutation) and a truncated TMPRSS4 mutant.

TABLE 3
TMPRSS4 sequences

| Human | MLQDPDSDQPLNSLDVKPLRKPRIPMETFRKVGIPIIIALLSLASIIIVVVLIKVILDKYYFLCGQ |
|---|---|
| TMPRSS4 | PLHFIPRKQLCDGELDCPLGEDEEHCVKSFPEGPAVAVRLSKDRSTLQVLDSATGNWFSACFDNFT |
| SEQ ID NO: | EALAETACRQMGYSSKPTFRAVEIGPDQDLDVVEITENSQELRMRNSSGPCLSGSLVSLHCLACGK |
| 960 | SLKTPRVVGVEEASVDSWPWQVSIQYDKQHVCGGSILDPHWVLTAAHCFRKHTDVFNWKVRAGSDK |
| | LGSFPSLAVAKIIIIEFNPMYPKDNDIALMKLQFPLTFSGTVRPICLPFFDEELTPATPLWIIGWG |
| | FTKQNGGKMSDILLQASVQVIDSTRCNADDAYQGEVTEKMMCAGIPEGGVDTCQGDSGGPLMYQSD |
| | QWHVVGIVSWGYGCGGPSTPGVYTKVSAYLNWIYNVWKAEL |
| Human | ATGCTCCAGGACCCAGACTCCGACCAGCCTCTTAACTCACTTGATGTCAAGCCCTTGCGAAAACCT |
| TMPRSS4 | CGGATTCCAATGGAAACTTTCAGAAAAGTGGGTATCCCGATTATCATCGCGTTGCTCAGCTTGGCC |
| SEQ ID NO: | TCAATAATCATTGTGGTCGTATTAATCAAAGTGATCCTGGACAAATACTACTTTCTCTGCGGTCAG |
| 961 | CCCTTGCATTTCATCCCAAGGAAGCAGCTCTGCGATGGGGAGCTGGATTGTCCCTTGGGCGAAGAT |
| | GAGGAACACTGCGTCAAAAGTTTTCCAGAAGGGCCCGCTGTCGCGGTGCGGCTGAGCAAGGATCGC |
| | TCTACCCTGCAAGTGCTGGACTCCGCGACCGGGAACTGGTTCAGTGCTTGTTTTGACAATTTCACC |
| | GAGGCCCTGGCTGAGACAGCCTGCCGCCAGATGGGGTATAGCTCCAAACCAACTTTTAGAGCTGTG |
| | GAGATTGGACCGGACCAGGACCTGGACGTTGTGGAAATCACGGAGAACTCCCAAGAACTCCGAATG |
| | AGAAATTCTAGTGGACCTTGTCTGTCTGGCTCCCTGGTATCTCTACACTGTCTGGCTTGCGGCAAA |
| | TCACTTAAGACACCCAGGGTGGTCGGAGTGGAGGAGGCCTCCGTGGATAGTTGGCCTTGGCAAGTC |
| | TCTATTCAATACGATAAGCAGCACGTGTGCGGAGGTTCGATACTCGATCCGCACTGGGTCTTGACA |
| | GCAGCCCACTGCTTCCGGAAACATACTGATGTTTTTAATTGGAAAGTTCGCGCAGGGTCTGACAAG |
| | CTGGGCTCATTCCCAAGCCTGGCTGTCGCAAAAATCATAATTATCGAGTTCAACCCTATGTACCCG |
| | AAAGACAACGACATCGCCCTTATGAAACTGCAATTTCCGCTAACATTCAGCGGAACCGTCCGACCA |
| | ATTTGCCTGCCCTTTTTCGACGAAGAATTAACACCCGCAACACCTCTGTGGATAATCGGCTGGGGC |
| | TTTACTAAGCAGAACGGCGGCAAGATGAGTGACATACTACTACAAGCAAGTGTGCAAGTTATTGAT |
| | AGTACCCGTTGTAATGCCGATGATGCTTACCAAGGCGAAGTTACGGAGAAGATGATGTGCGCAGGG |
| | ATTCCAGAGGGTGGCGTGGATACCTGTCAGGGTGATAGCGGAGGGCCCTTAATGTATCAGTCCGAC |
| | CAGTGGCATGTCGTGGGGATAGTTAGCTGGGGCTACGGATGTGGAGGCCCTAGCACTCCCGGCGTC |
| | TATACCAAGGTGTCGGCCTATCTTAATTGGATCTATAACGTGTGGAAAGCCGAGTTG |
| TMPRSS4 | MLQDPDSDQPLNSLDVKPLRKPRIPMETFRKVGIPIIIALLSLASIIIVVVLIKVILDKYYFLCGQ |
| D290A- | PLHFIPRKQLCDGELDCPLGEDEEHCVKSFPEGPAVAVRLSKDRSTLQVLDSATGNWFSACFDNFT |
| Catalytically | EALAETACRQMGYSSKPTFRAVEIGPDQDLDVVEITENSQELRMRNSSGPCLSGSLVSLHCLACGK |
| inactive | SLKTPRVVGVEEASVDSWPWQVSIQYDKQHVCGGSILDPHWVLTAAHCFRKHTDVFNWKVRAGSDK |
| SEQ ID NO: | LGSFPSLAVAKIIIIEFNPMYPKDNAIALMKLQFPLTFSGTVRPICLPFFDEELTPATPLWIIGWG |
| 996 | FTKQNGGKMSDILLQASVQVIDSTRCNADDAYQGEVTEKMMCAGIPEGGVDTCQGDSGGPLMYQSD |
| | QWHVVGIVSWGYGCGGPSTPGVYTKVSAYLNWIYNVWKAEL |
| TMPRSS4_ | MLQDPDSDQPLNSLDVKPLRKPRIPMETFRKVGIPIIIALLSLASIIIVVVLIKVILDKYYFLCGQ |
| Truncated | PLHFIPRKQLCDGELDCPLGEDEEHCVKSFPEGPAVAVRLSKDRSTLQVLDSATGNWFSACFDNFT |
| mutant 1- | EALAETACRQMGYSSKPTFRAVEIGPDQDLDVVEITENSQELRMRNSSGPCLSGSLVSLHCLACGK |
| 204 | SLKTPR |
| SEQ ID NO: | |
| 997 | |

[0397] In some embodiments, the TMPRSS4 antigen-binding moiety (e.g., an antigen binding protein or domain such as an antibody of antigen binding fragment thereof) is selected from the group consisting of an antibody, a nanobody, a diabody, a triabody, or a minibody, a F(ab′)₂ fragment, a Fab fragment, a single chain variable fragment (scFv), and a single domain antibody (sdAb), or a functional fragment thereof. In some embodiments, the antigen-binding moiety comprises an scFv. The antigen-binding moiety can include naturally-occurring amino acid sequences or can be engineered, designed, or modified so as to provide desired and/or improved properties, e.g., increased binding affinity.

[0398] Table 4 provides exemplary amino acid sequences of antibody heavy chain variable domains (VHs) and light chain variable domains (VLs) that, in combination, bind to TMPRSS4 with CDR-H1, CDR-H2, CDR-H3, CDR-L1, CDR-L2, and CDR-L3 sequences noted below the respective VH or VL sequence. The CDR sequences provided in Table 4 are annotated using the Kabat scheme.

TABLE 4
TMPRSS4 VH and VL Amino Acid Sequences

| Clone | VH Sequence | VL Sequence |
|---|---|---|
| TMPRSS4 | QVQLVQSGAEVKKPGSSVKVSCKASGYTFTD | DIQMTQSPSSLSASVGDRVTITCQASQDISNY |
| Ab1 | YYMHWVRQAPGQGLEWMGGIIPIFGTANYAQ | LNWYQQKPGKAPKLLIYKASSLESGVPSRFSG |
| | KFQGRVTITADESTSTAYMELSSLRSEDTAV | SGSGTDFTLTISSLQPEDFATYYCQQSSRIPP |
| | YYCAKEGANGYWGQGTLVTVSS (SEQ ID | TFGQGTKVEIK (SEQ ID NO: 2) |
| | NO: 1) | QASQDISNYLN (SEQ ID NO: 6) |
| | DYYMH (SEQ ID NO: 3) | KASSLES (SEQ ID NO: 7) |
| | GIIPIFGTANYAQKFQG (SEQ ID NO: 4) | QQSSRIPPT (SEQ ID NO: 8) |
| | EGANGY (SEQ ID NO: 5) | |
| TMPRSS4 | EVQLLESGGGLVQPGGSLRLSCAASGFTFSD | DIQMTQSPSSLSASVGDRVTITCRASQSTNNY |
| Ab2 | YYMSWVRQAPGKGLEWVSYISGSGDAIYYAD | VNWYQQKPGKAPKLLIYAASSLQSGVPSRFSG |
| | SVKGRFTISRDNSKNTLYLQMNSLRAEDTAV | SGSGTDFTLTISSLQPEDFATYYCQQSYSIPL |
| | YYCARDRSDCGGDDRFLCDGYFDLWGRGTLV | TFGPGTKVDIK (SEQ ID NO: 10) |
| | SLS (SEQ ID NO: 9) | RASQSTNNYVN (SEQ ID NO: 14) |
| | DYYMS (SEQ ID NO: 11) | AASSLQS (SEQ ID NO: 15) |
| | YISGSGDAIYYADSVKG(SEQ ID NO: 12) | QQSYSIPLT (SEQ ID NO: 16) |
| | DRSDCGGDDRFLCDGYFDL(SEQ ID NO: 13) | |
| TMPRSS4 | QVQLVQSGAEVKKPGSSVKVSCKASGYTFTS | DIVMTQSPLSLPVTPGEPASISCRSSGSLLHS |
| Ab3 | YDINWVRQAPGQGLEWMGGIIPIFGTTKFAQ | NGYNYLDWYLQKPGQSPQLLIYAASSLQSGVP |
| | KFQGRVTITADESTSTAYMELSSLRSEDTAV | DRFSGSGSGTDFTLKISRVEAEDVGVYYCMQG |
| | YYCARDWYSSSWYNGDRGDWEDPWGQGTLVT | THWPGTFGQGTKVEIK (SEQ ID NO: 18) |
| | VSS (SEQ ID NO: 17) | RSSGSLLHSNGYNYLD (SEQ ID NO: 22) |
| | SYDIN (SEQ ID NO: 19) | AASSLQS (SEQ ID NO: 15) |
| | GIIPIFGTTKFAQKFQG (SEQ ID NO: 20) | MQGTHWPGT (SEQ ID NO: 23) |
| | DWYSSSWYNGDRGDWFDP (SEQ ID NO: 21) | |
| TMPRSS4 | QVQLVQSGAEVKKPGASVKVSCKASGYFFTT | DIVMTQSPLSLPVTPGEPASISCRSSQSLLHS |
| Ab4 | YYLHWVRQAPGQGLEWMGVINPNSRLTSYAE | NGYNYLDWYLQKPGQSPQLLIYAASTLQSGVP |
| | SFQGRVTMTRDTSTSTVYMELSSLRSEDTAV | DRFSGSGSGTDFTLKISRVEAEDVGVYYCMQG |
| | YYCEREMFPSSYGIDVWGQGTTVTVSS (SEQ | THWPPTFGQGTKLEIK (SEQ ID NO: 25) |
| | ID NO: 24) | RSSQSLLHSNGYNYLD (SEQ ID NO: 29) |
| | TYYLH (SEQ ID NO: 26) | AASTLQS (SEQ ID NO: 30) |
| | VINPNSRLTSYAESFQG (SEQ ID NO: 27) | MQGTHWPPT (SEQ ID NO: 31) |
| | EMFPSSYGIDV (SEQ ID NO: 28) | |
| TMPRSS4 | QVQLVQSGAEVKKPGSSVKVSCKASGYTFTS | EIVMTQSPATLSVSPGERATLSCRASQSVSSN |
| Ab5 | YYMHWVRQAPGQGLEWMGRIIPILGATDYAQ | LAWYQQKPGQAPRLLIYGASTRATGIPARFSG |
| | KFQGRVTITADESTSTAYMELSSLRSEDTAV | SGSGTEFTLTISSLQSEDFAVYYCQQYYSPFP |
| | YYCARAGYSSIAARPAFWGQGTLVTVSS | LTFGGGTKVEIK (SEQ ID NO: 33) |
| | (SEQ ID NO: 32) | RASQSVSSNLA (SEQ ID NO: 37) |
| | SYYMH (SEQ ID NO: 34) | GASTRAT (SEQ ID NO: 38) |
| | RIIPILGATDYAQKFQG (SEQ ID NO: 35) | QQYYSPFPLT (SEQ ID NO: 39) |
| | AGYSSIAARPAF (SEQ ID NO: 36) | |
| TMPRSS4 | QVQLVQSGAEVKKPGASVKVSCKASGYTFTS | DIVMTQSPDSLAVSLGERATINCKSSQSVLYS |
| Ab6 | YYMHWVRQAPGQGLEWLGIINPSDYTTSYAQ | SNNKNYLAWYQQKPGQPPKLLIYWASTRESGV |
| | KFQGRVTMTRDTSTSTVYMELSSLRSEDTAV | PDRFSGSGSGTDFTLTISSLQAEDVAIYYCQQ |
| | YYCARVASSSWYPGDENWYFDLWGRGTLVTV | YYAIPWTFGQGTKVEIK (SEQ ID NO: 41) |
| | SS (SEQ ID NO: 40) | KSSQSVLYSSNNKNYLA (SEQ ID NO: 44) |
| | SYYMH (SEQ ID NO: 34) | WASTRES (SEQ ID NO: 45) |
| | IINPSDYTTSYAQKFQG (SEQ ID NO: 42) | QQYYAIPWT (SEQ ID NO: 46) |
| | VASSSWYPGDENWYFDL (SEQ ID NO: 43) | |
| TMPRSS4 | QVQLVQSGAEVKKPGASVKVSCKASGYTFSR | EIVMTQSPATLSVSPGERATLSCRASQRVSNN |
| Ab7 | YFMHWVRQAPGQGLEWVGWINPNSGNTGYAQ | YLAWYQQKPGQAPRLLIYGASTRASGIPARFS |
| | KFQGRVTMTRDTSTSTVYMELSSLRSEDTAV | GSGSGTEFTLTISSLQSEDFAVYYCQQYGSTP |
| | YYCARVVTGGRLDVWGQGTTVTVSS (SEQ ID | YTFGQGTKVEIK (SEQ ID NO: 48) |
| | NO: 47) | RASQRVSNNYLA (SEQ ID NO: 52) |
| | RYFMH (SEQ ID NO: 49) | GASTRAS (SEQ ID NO: 53) |
| | WINPNSGNTGYAQKFQG (SEQ ID NO: 50) | QQYGSTPYT (SEQ ID NO: 54) |
| | VVTGGRLDV (SEQ ID NO: 51) | |
| TMPRSS4 | QVQLVQSGAEVKKPGASVKVSCKASGYRFTS | DIQMTQSPSSLSASVGDRVTITCRASQSISSW |
| Ab8 | QYMHWVRQAPGQGLEWMGIINPSGGSTSYAQ | LAWYQQKPGKAPKLLIYGASSLQSGVPSRFSG |
| | KFQGRVTMTRDTSTSTVYMELSSLRSEDTAV | SGSGTDFTLTISSLQPEDFATYYCQQANSFPP |
| | YYCARGRIAVAGHPLGYWGQGTLVTVSS | TFGGGTKVEIK (SEQ ID NO: 56) |
| | (SEQ ID NO: 55) | RASQSISSWLA (SEQ ID NO: 60) |
| | SQYMH (SEQ ID NO: 57) | GASSLQS (SEQ ID NO: 61) |
| | IINPSGGSTSYAQKFQG (SEQ ID NO: 58) | QQANSFPPT (SEQ ID NO: 62) |
| | GRIAVAGHPLGY (SEQ ID NO: 59) | |
| TMPRSS4 | QVQLVQSGAEVKKPGASVKVSCKASGYTFTR | DIQMTQSPSSLSASVGDRVTITCQASQDISRF |
| Ab9 | YYMHWVRQAPGQGLEWMGWINPNSGGTNYAQ | LHWYQQKPGKAPKLLIYGASNLKSGVPSRFSG |
| | KFQGRVTMTRDTSTSTVYMELSSLRSEDTAV | SGSGTDFTLTISSLQPEDFATYYCQQSYSTPP |
| | YYCARGGSWGSGPLGYWGQGTLVTVSS (SEQ | TFGGGTKVEIK (SEQ ID NO: 64) |
| | ID NO: 63) | QASQDISRFLH (SEQ ID NO: 68) |
| | RYYMH (SEQ ID NO: 65) | GASNLKS (SEQ ID NO: 69) |
| | WINPNSGGTNYAQKFQG (SEQ ID NO: 66) | QQSYSTPPT (SEQ ID NO: 70) |
| | GGSWGSGPLGY (SEQ ID NO: 67) | |
| TMPRSS4 | QVQLVQSGAEVKKPGASVKVSCKASGYTFTS | EIVMTQSPATLSVSPGERATLSCRASQSVSSY |
| Ab10 | YYMHWVRQAPGQGLEWMGIINPSGAGTTYGH | LAWYQQKPGQAPRLLIYGASTRATGIPARFSG |
| | NFQGRVTMTRDTSTSTVYMELSSLRSEDTAV | SGSGTEFTLTISSLQSEDFAVYYCQQYGSSPG |
| | YYCARGPRDTAMVRFDYWGQGTLVTVSS | TFGQGTKLEIK (SEQ ID NO: 72) |
| | (SEQ ID NO: 71) | RASQSVSSYLA (SEQ ID NO: 75) |
| | SYYMH (SEQ ID NO: 34) | GASTRAT (SEQ ID NO: 38) |
| | IINPSGAGTTYGHNFQG (SEQ ID NO: 73) | QQYGSSPGT (SEQ ID NO: 76) |
| | GPRDTAMVRFDY (SEQ ID NO: 74) | |
| TMPRSS4 | QVQLVQSGAEVKKPGASVKVSCKASGGTFSN | DIQMTQSPSSLSASVGDRVTITCRASQSINNY |
| Ab11 | YAISWVRQAPGQGLEWVGRINPNSGGTNYAQ | LNWYQQKPGKAPKLLIYAASSLQSGVPSRFSG |
| | KFQGRVTMTRDTSTSTVYMELSSLRSEDTAV | SGSGTDFTLTISSLQPEDFATYYCQQSYSTKW |
| | YYCARGRYSSSSWGQGTLVTVSS (SEQ ID | TFGQGTKVEIK (SEQ ID NO: 78) |
| | NO: 77) | RASQSINNYLN (SEQ ID NO: 82) |
| | NYAIS (SEQ ID NO: 79) | AASSLQS (SEQ ID NO: 15) |
| | RINPNSGGTNYAQKFQG (SEQ ID NO: 80) | QQSYSTKWT (SEQ ID NO: 83) |
| | GRYSSSS (SEQ ID NO: 81) | |
| TMPRSS4 | QVQLVQSGAEVKKPGASVKVSCKASGYTFSN | DIQMTQSPSSLSASVGDRVTITCRASQGISRW |
| Ab12 | YYIHWVRQAPGQGLEWMGWINPNSGDTNYAQ | LAWYQQKPGKAPKLLIYGASNLQTGVPSRFSG |
| | KFQGRVTMTRDTSTSTVYMELSSLRSEDTAV | SGSGTDFTLTISSLQPEDFATYYCQQSYSTPP |
| | YYCARGMTWRTSAATYWGQGTLVTVSS (SEQ | TFGPGTKVDIK (SEQ ID NO: 85) |
| | ID NO: 84) | RASQGISRWLA (SEQ ID NO: 89) |
| | NYYIH (SEQ ID NO: 86) | GASNLQT (SEQ ID NO: 90) |
| | WINPNSGDTNYAQKFQG (SEQ ID NO: 87) | QQSYSTPPT (SEQ ID NO: 70) |
| | GMTWRTSAATY (SEQ ID NO: 88) | |
| TMPRSS4 | QVQLVQSGAEVKKPGASVKVSCKASGYTFTN | EIVMTQSPATLSVSPGERATLSCRASQSVNGN |
| Ab13 | YYMHWVRQAPGQGLEWMGWISAYNGNTNYAQ | YLAWYQQKPGQAPRLLIYGVSSRASGIPARFS |
| | KLQGRVTMTRDTSTSTVYMELSSLRSEDTAV | GSGSGTEFTLTISSLQSEDFAVYYCQQYGSSP |
| | YYCATASGWGHSNSAGYWGQGTLVTVSS | YTFGQGTKVEIK (SEQ ID NO: 92) |
| | (SEQ ID NO: 91) | RASQSVNGNYLA (SEQ ID NO: 96) |
| | NYYMH (SEQ ID NO: 93) | GVSSRAS (SEQ ID NO: 97) |
| | WISAYNGNTNYAQKLQG (SEQ ID NO: 94) | QQYGSSPYT (SEQ ID NO: 98) |
| | ASGWGHSNSAGY (SEQ ID NO: 95) | |
| TMPRSS4 | EVQLLESGGGLVQPGGSLRLSCAASGFTFSN | DIQMTQSPSSLSASVGDRVTITCRASQRISTY |
| Ab14 | HYMSWVRQAPGKGLEWVSAISGSGGSTYYAD | LNWYQQKPGKAPKLLIYSASTLQAGVPSRFSG |
| | SVKGRFTISRDNSKNTLYLQMNSLRAGDTAV | SGSGTDFTLTISSLQPEDFATYYCQQAYSLPW |
| | YYCARDRYRWGRGYFQHWGQGTLVTVSS | TFGQGTKLEIK (SEQ ID NO: 100) |
| | (SEQ ID NO: 99) | RASQRISTYLN (SEQ ID NO: 104) |
| | NHYMS (SEQ ID NO: 101) | SASTLQA (SEQ ID NO: 105) |
| | AISGSGGSTYYADSVKG (SEQ ID NO: 102) | QQAYSLPWT (SEQ ID NO: 106) |
| | DRYRWGRGYFQH (SEQ ID NO: 103) | |
| TMPRSS4 | QVQLVQSGAEVKKPGASVKVSCKASGYTFTR | DIQMTQSPSSLSASVGDRVTITCRASQSINTW |
| Ab15 | YYMHWVRQAPGQGLEWMGWINPNSGVTNFAQ | LAWYQQKPGKAPKLLIYAASSLQSGVPSRFSG |
| | KFQGRVTMTRDTSTSTVYMELSSLRSEDTAV | SGSGTDFTLTISSLQPEDFATYYCQQAISFPL |
| | YYCARVRIGWLQSPPLYWGQGTLVTVSS | TFGGGTKVEIK (SEQ ID NO: 108) |
| | (SEQ ID NO: 107) | RASQSINTWLA (SEQ ID NO: 111) |
| | RYYMH (SEQ ID NO: 65) | AASSLQS (SEQ ID NO: 15) |
| | WINPNSGVTNFAQKFQG (SEQ ID NO: 109) | QQAISFPLT (SEQ ID NO: 112) |
| | VRIGWLQSPPLY (SEQ ID NO: 110) | |
| TMPRSS4 | QVQLVQSGAEVKKPGASVKVSCKASGYTFSR | DIQMTQSPSSLSASVGDRVTITCRASQSINRW |
| Ab16 | HYMHWVRQAPGQGLEWMGRINPNSGGTNYAQ | LAWYQQKPGKAPKLLIYGASNLQSGVPSRFSG |
| | KFQGRVTMTRDTSTSTVYMELSSLRSEDTAV | SGSGTDFTLTISSLQPEDFATYYCQQANSFPY |
| | YYCARSIYGDYWFDPWGQGTLVTVSS (SEQ | TFGQGTKLEIK (SEQ ID NO: 114) |
| | ID NO: 113) | RASQSINRWLA (SEQ ID NO: 117) |
| | RHYMH (SEQ ID NO: 115) | GASNLQS (SEQ ID NO: 118) |
| | RINPNSGGTNYAQKFQG (SEQ ID NO: 80) | QQANSFPYT (SEQ ID NO: 119) |
| | SIYGDYWEDP (SEQ ID NO: 116) | |
| TMPRSS4 | QVQLVQSGAEVKKPGASVKVSCKASGYTFTS | DIQMTQSPSSLSASVGDRVTITCRASQGISSY |
| Ab17 | YYIHWVRQAPGQGLEWMGWMSPNSGDTGYAQ | LNWYQQKPGKAPKLLIYAASRLQSGVPSRFSG |
| | KFQGRVTMTRDTSTSTVYMELSSLRSEDTAV | SGSGTDFTLTISSLQPEDFATYYCQQSYRSPP |
| | YYCARLVRGGFDYWGQGTLVTVSS (SEQ ID | TFGQGTKLEIK (SEQ ID NO: 121) |
| | NO: 120) | RASQGISSYLN (SEQ ID NO: 125) |
| | SYYIH (SEQ ID NO: 122) | AASRLQS (SEQ ID NO: 126) |
| | WMSPNSGDTGYAQKFQG (SEQ ID NO: 123) | QQSYRSPPT (SEQ ID NO: 127) |
| | LVRGGFDY (SEQ ID NO: 124) | |
| TMPRSS4 | QVQLVQSGAEVKKPGASVKVSCKASGYTFTS | DIVMTQSPDSLAVSLGERATINCKSSQSVLYS |
| Ab18 | SGINWVRQAPGQGLEWMGWINPNSGGAKYAQ | SNNKNYLAWYQQKPGQPPKLLIYWASTRESGV |
| | RFQGRVTMTRDTSTSTVYMELSSLRSEDTAV | PDRFSGSGSGTDFTLTISSLQAEDVAVYHCQQ |
| | YYCARARGYSGSKRDFQHWGQGTLVTVSS | YYNTPFTFGPGTKVDIK (SEQ ID NO: 129) |
| | (SEQ ID NO: 128) | KSSQSVLYSSNNKNYLA (SEQ ID NO: 44) |
| | SSGIN (SEQ ID NO: 130) | WASTRES (SEQ ID NO: 45) |
| | WINPNSGGAKYAQRFQG (SEQ ID NO: 131) | QQYYNTPFT (SEQ ID NO: 133) |
| | ARGYSGSKRDFQH (SEQ ID NO: 132) | |
| TMPRSS4 | QVQLVQSGAEVKKPGASVKVSCKASGYTENR | DIQMTQSPSSLSASVGDRVTITCRASQSISRY |
| Ab19 | KFMHWVRQAPGQGLEWMGWMNPNNGATNYAQ | LNWYQQKPGKAPKLLIYGASNLQSGVPSRFSG |
| | KFQGRVTMTRDTSTSTVYMELSSLRSEDTAV | SGSGTDFTLTISSLQPEDFATYYCQQSYSTPP |
| | YYCARGRGYYGSGSYYGDYWGQGTLVTVSS | TFGPGTKVDIK (SEQ ID NO: 135) |
| | (SEQ ID NO: 134) | RASQSISRYLN (SEQ ID NO: 139) |
| | RKFMH (SEQ ID NO: 136) | GASNLQS (SEQ ID NO: 118) |
| | WMNPNNGATNYAQKFQG (SEQ ID NO: 137) | QQSYSTPPT (SEQ ID NO: 70) |
| | GRGYYGSGSYYGDY (SEQ ID NO: 138) | |
| TMPRSS4 | QVQLVQSGAEVKKPGASVKVSCKASGYTFTR | DIQMTQSPSSLSASVGDRVTITCRASQNIATY |
| Ab20 | YYMHWVRQAPGQGLEWMGWMNPNSGNAGYAQ | LSWYQQKPGKAPKLLIYGASALRSGVPSRFSG |
| | KLQGRVTMTRDTSTSTVYMELSSLRSEDTAV | SGSGTDFTLTISSLQPEDFATYYCLQHNTYPL |
| | YYCARGYNWFDPWGQGTLVTVSS (SEQ ID | TFGGGTKVEIK (SEQ ID NO: 141) |
| | NO: 140) | RASQNIATYLS (SEQ ID NO: 144) |
| | RYYMH (SEQ ID NO: 65) | GASALRS (SEQ ID NO: 145) |
| | WMNPNSGNAGYAQKLQG (SEQ ID NO: 142) | LQHNTYPLT (SEQ ID NO: 146) |
| | GYNWFDP (SEQ ID NO: 143) | |
| TMPRSS4 | QVQLVQSGAEVKKPGASVKVSCKASGYSFSG | DIQMTQSPSSLSASVGDRVTITCRASQSISRY |
| Ab21 | YYLHWVRQAPGQGLEWMGWMNPDSGNTGYAQ | LNWYQQKPGKAPKLLIYAASTLQSGVPSRFSG |
| | NFQGRVTMTRDTSTSTVYMELSSLRSEDTAV | SGSGTDFTLTISSLQPEDFATYYCQQSYSTPV |
| | YYCARLHRGGHDYWGQGTLVTVSS (SEQ ID | TFGQGTRLEIK (SEQ ID NO: 148) |
| | NO: 147) | RASQSISRYLN (SEQ ID NO: 139) |
| | GYYLH (SEQ ID NO: 149) | AASTLQS (SEQ ID NO: 30) |
| | WMNPDSGNTGYAQNFQG (SEQ ID NO: 150) | QQSYSTPVT (SEQ ID NO: 152) |
| | LHRGGHDY (SEQ ID NO: 151) | |
| TMPRSS4 | QVQLVQSGAEVKKPGASVKVSCKASGYTFTS | DIQMTQSPSSLSASVGDRVTITCRAGQNIKRY |
| Ab22 | YYMHWVRQAPGQGLEWMGRINPHSGDADFVD | LNWYQQKPGKAPKLLIYAASSLQSGVPSRFSG |
| | KFQGRVTMTRDTSTSTVYMELSSLRSEDTAV | SGSGTDFTLTISSLQPEDFATYYCQQSYSSPL |
| | YYCARDRRGYGGNSLDYWGQGTLVTVSS | TFGGGTKVEIK (SEQ ID NO: 154) |
| | (SEQ ID NO: 153) | RAGQNIKRYLN (SEQ ID NO: 157) |
| | SYYMH (SEQ ID NO: 34) | AASSLQS (SEQ ID NO: 15) |
| | RINPHSGDADFVDKFQG (SEQ ID NO: 155) | QQSYSSPLT (SEQ ID NO: 158) |
| | DRRGYGGNSLDY (SEQ ID NO: 156) | |
| TMPRSS4 | QVQLVQSGAEVKKPGASVKVSCKASGYTFTR | EIVMTQSPATLSVSPGERATLSCRASQSVGNY |
| Ab23 | NYLHWVRQAPGQGLEWMGIINPSGGSTTYAQ | LAWYQQKPGQAPRLLIYGASTRATGIPARFSG |
| | KFQGRVTMTRDTSTSTVYMELSSLRSEDTAV | SGSGTEFTLTISSLQSEDFAVYYCQQYHSSPP |
| | YYCARGRTWFRSGMDVWGQGTTVTVSS (SEQ | YTFGQGTKVEIK (SEQ ID NO: 160) |
| | ID NO: 159) | RASQSVGNYLA (SEQ ID NO: 164) |
| | RNYLH (SEQ ID NO: 161) | GASTRAT (SEQ ID NO: 38) |
| | IINPSGGSTTYAQKFQG (SEQ ID NO: 162) | QQYHSSPPYT (SEQ ID NO: 165) |
| | GRTWFRSGMDV (SEQ ID NO: 163) | |
| TMPRSS4 | QVQLVQSGAEVKKSGASVKVSCKASGYTFTS | DIQMTQSPSSLSASVGDRVTITCRASQSISSW |
| Ab24 | YYMHWVRQAPGQGLEWMGVINPSGGTTSYAQ | LAWYQQKPGKAPKLLIYAASTLQSGVPSRFSG |
| | KFQGRVTMTRETSTSTVYMELSSLRSEDTAV | SGSGTDFTLTISSLQPEDFATYYCQQSYNTPY |
| | YYCARGRGWLRSALGYWGQGTLVTVSS (SEQ | TFGQGTKLEIK (SEQ ID NO: 167) |
| | ID NO: 166) | RASQSISSWLA (SEQ ID NO: 60) |
| | SYYMH (SEQ ID NO: 34) | AASTLQS (SEQ ID NO: 30) |
| | VINPSGGTTSYAQKFQG (SEQ ID NO: 168) | QQSYNTPYT (SEQ ID NO: 170) |
| | GRGWLRSALGY (SEQ ID NO: 169) | |
| TMPRSS4 | QVQLVQSGAEVKKPGASVKVSCKASGGRFST | EIVMTQSPATLSVSPGERATLSCRASQSVSSN |
| Ab25 | YALSWVRQAPGQGLEWMGWINPNSGGTNYAQ | YLAWYQQKPGQAPRLLIYGISTRASGIPARFS |
| | KFQGRVTMTRDTSTSTVYMELSSLRSEDTAV | GSGSGTEFTLTISSLQSEDFAVYYCQQRSNWP |
| | YYCAKSLWWSPSHYYYYGMDVWGQGTTVTVS | PSITFGQGTRLEIK (SEQ ID NO: 172) |
| | S (SEQ ID NO: 171) | RASQSVSSNYLA (SEQ ID NO: 175) |
| | TYALS (SEQ ID NO: 173) | GISTRAS (SEQ ID NO: 176) |
| | WINPNSGGTNYAQKFQG (SEQ ID NO: 66) | QQRSNWPPSIT (SEQ ID NO: 177) |
| | SLWWSPSHYYYYGMDV (SEQ ID NO: 174) | |
| TMPRSS4 | EVQLLESGGGLVQPGGSLRLSCAASGFTFSS | DIQMTQSPSSLSASVGDRVTITCRASQNVGSW |
| Ab26 | YAMHWVRQAPGKGLEWVAVIWYDGSSKYYAD | LAWYQQKPGKAPKLLIYAASSLQSGVPSRFSG |
| | SVKGRFTISRDNSKNTLYLQMNSLRAEDTAV | SGSGTDFTLTIRSLQPEDFATYYCQQSYSTPI |
| | YYCARGEVRRGFQHWGQGTLVTVSS (SEQ ID | TFGQGTRLEIK (SEQ ID NO: 179) |
| | NO: 178) | RASQNVGSWLA (SEQ ID NO: 183) |
| | SYAMH (SEQ ID NO: 180) | AASSLQS (SEQ ID NO: 15) |
| | VIWYDGSSKYYADSVKG (SEQ ID NO: 181) | QQSYSTPIT (SEQ ID NO: 184) |
| | GEVRRGFQH (SEQ ID NO: 182) | |
| TMPRSS4 | QVQLVQSGAEVKKPGASVKVSCKASGYTFSR | DIQMTQSPSSLSASVGDRVTITCRASQSISTW |
| Ab27 | YYMHWVRQAPGQGLEWMGWMNPNSGDTGYAQ | LAWYQQKPGKAPKLLIYAASSLQSGVPSRFSG |
| | KFQGRVTMTRDTSTSTVYMELSSLRSEDTAV | SGSGTDFTLTISSLQPEDFATYYCQQLSSYPL |
| | YYCAKGREWLRSPFDYWGQGTLVTVSS (SEQ | TFGQGTKVEIK (SEQ ID NO: 186) |
| | ID NO: 185) | RASQSISTWLA (SEQ ID NO: 292) |
| | RYYMH (SEQ ID NO: 187) | AASSLQS (SEQ ID NO: 15) |
| | WMNPNSGDTGYAQKFQG (SEQ ID NO: 188) | QQLSSYPLT (SEQ ID NO: 190) |
| | GREWLRSPFDY (SEQ ID NO: 189) | |
| TMPRSS4 | QVQLVQSGAEVKKPGASVKVSCKASGYTFTG | DIQMTQSPSSLSASVGDRVTITCRASQGIGNY |
| Ab28 | YYMHWVRQAPGQGLEWMGWMNPNSGNTGYAQ | LAWYQQKPGKAPKLLIYAASSLESGVPSRFSG |
| | KFQGRVTMTRDTSTSTVYMELSSLRSEDTAV | SGSGTDFTLTISSLQPEDFATYYCQQGYRFPP |
| | YYCARLRAKGGGFDYWGQGTLVTVSS (SEQ | TFGPGTKVDIK (SEQ ID NO: 192) |
| | ID NO: 191) | RASQGIGNYLA (SEQ ID NO: 196) |
| | GYYMH (SEQ ID NO: 193) | AASSLES (SEQ ID NO: 197) |
| | WMNPNSGNTGYAQKFQG (SEQ ID NO: 194) | QQGYRFPPT (SEQ ID NO: 198) |
| | LRAKGGGFDY (SEQ ID NO: 195) | |
| TMPRSS4 | QVQLVQSGAEVKKPGASVKVSCKASGYTFAN | DIVMTQSPLSLPVTPGEPASISCRSSQSLLHS |
| Ab29 | YNIHWVRQAPGQGLEWMGWMNPNSGNTGYAQ | NGYNYLDWYLQKPGQSPQLLIYLGSNRASGVP |
| | KFQGRVTMTRDTSTSTVYMELSSLRSEDTAV | DRFSGSGSGTDFTLKISRVEAEDVGVYYCMQS |
| | YYCARPRYSSGWYGWYFDLWGRGTLVTVSS | TYWPPTFGQGTKLEIK (SEQ ID NO: 200) |
| | (SEQ ID NO: 199) | RSSQSLLHSNGYNYLD (SEQ ID NO: 29) |
| | NYNIH (SEQ ID NO: 201) | LGSNRAS (SEQ ID NO: 203) |
| | WMNPNSGNTGYAQKFQG (SEQ ID NO: 194) | MQSTYWPPT (SEQ ID NO: 204) |
| | PRYSSGWYGWYFDL (SEQ ID NO: 202) | |
| TMPRSS4 | QVQLVQSGAEVKKPGASVKVSCKASGYTFTT | EIVMTQSPATLSVSPGERATLSCRASQSVGRY |
| Ab30 | YYMHWVRQAPGQGLEWMGWMNPNSGNTGYAQ | LAWYQQKPGQAPRLLIYGASTRATGIPARFSG |
| | KFQGRVTMTRDTSTSTVYMELSSLRSEDTAV | SGSGTEFTLTISSLQSEDFAVYYCQHYDSSPM |
| | YYCARARTWLLSPFDYWGQGTLVTVSS (SEQ | YTFGQGTKLEIK (SEQ ID NO: 206) |
| | ID NO: 205) | RASQSVGRYLA (SEQ ID NO: 209) |
| | TYYMH (SEQ ID NO: 207) | GASTRAT (SEQ ID NO: 38) |
| | WMNPNSGNTGYAQKFQG (SEQ ID NO: 194) | QHYDSSPMYT (SEQ ID NO: 210) |
| | ARTWLLSPEDY (SEQ ID NO: 208) | |
| TMPRSS4 | QVQLVQSGAEVKKPGSSVKVSCKASGYTFRG | EIVMTQSPATLSVSPGERATLSCRASQSVRSY |
| Ab31 | SGISWVRQAPGQGLEWMGIIYPADSETRYSP | LAWYQQKPGQAPRLLIYGASTRATGIPARFSG |
| | SFQGRVTITADESTSTAYMELSSLRSEDTAV | SGSGTEFTLTISSLQSEDFAVYYCQQHGSLPL |
| | YYCARESSSWDYFDYWGQGTLVTVSS (SEQ | TFGQGTKVEIK (SEQ ID NO: 212) |
| | ID NO: 211) | RASQSVRSYLA (SEQ ID NO: 216) |
| | GSGIS (SEQ ID NO: 213) | GASTRAT (SEQ ID NO: 38) |
| | IIYPADSETRYSPSFQG (SEQ ID NO: 214) | QQHGSLPLT (SEQ ID NO: 217) |
| | ESSSWDYFDY (SEQ ID NO: 215) | |
| TMPRSS4 | QVQLVQSGAEVKKPGSSVKVSCKASGGTFSS | DIQMTQSPSSLSASVGDRVTITCRASQSISTY |
| Ab32 | YAISWVRQAPGQGLEWMGRINPSGGSTSYAQ | LNWYQQKPGKAPKLLIYAASSLQRGVPSRFSG |
| | KFQGRVTMTRDTSTSTVYMELSSLRSEDTAV | SGSGTDFTLTISSLQPEDFATYYCQQSYTTPL |
| | YYCARGRYSSSSWGQGTLVTVSS (SEQ ID | TFGGGTKVEIK (SEQ ID NO: 219) |
| | NO: 218) | RASQSISTYLN (SEQ ID NO: 222) |
| | SYAIS (SEQ ID NO: 220) | AASSLQR (SEQ ID NO: 223) |
| | RINPSGGSTSYAQKFQG (SEQ ID NO: 221) | QQSYTTPLT (SEQ ID NO: 224) |
| | GRYSSSS (SEQ ID NO: 81) | |
| TMPRSS4 | QVQLVQSGAEVKKPGASVKVSCKASGYTFSN | DIQMTQSPSSLSASVGDRVTITCRASQYISRW |
| Ab33 | YYMHWVRQAPGQGLEWVGWMNPKSGNTGYAQ | LAWYQQKPGKAPKLLIYGSSTLQSGVPSRFSG |
| | KFQGRVTMTRDTSTSTVYMELSSLRSEDTAV | SGSGTDFTLTISSLQPEDFATYYCQQYYSTPF |
| | YYCARGRTWIQSSLGYWGQGTLVTVSS (SEQ | TFGPGTKLEIK (SEQ ID NO: 226) |
| | ID NO: 225) | RASQYISRWLA (SEQ ID NO: 230) |
| | NYYMH (SEQ ID NO: 227) | GSSTLQS (SEQ ID NO: 231) |
| | WMNPKSGNTGYAQKFQG (SEQ ID NO: 228) | QQYYSTPFT (SEQ ID NO: 232) |
| | GRTWIQSSLGY (SEQ ID NO: 229) | |
| TMPRSS4 | QVQLVQSGAEVKKPGASVKVSCKASGYTFTG | DIQMTQSPSSLSASVGDRVTITCRASQGISSW |
| Ab34 | YYIHWVRQAPGQGLEWMGWMNPHSGNTGYAQ | LAWYQQKPGKAPKLLIYAASTLQTGVPSRFSG |
| | KFQGRVTMTRDTSTSTVYMELSSLRSEDTAV | SGSGTDFTLTISSLQPEDFATYYCQQSKSIPI |
| | YYCAREGGRYSSGRLGYWGQGTLVTVSS | TFGGGTKVEIK (SEQ ID NO: 234) |
| | (SEQ ID NO: 233) | RASQGISSWLA (SEQ ID NO: 238) |
| | GYYIH (SEQ ID NO: 235) | AASTLQT (SEQ ID NO: 239) |
| | WMNPHSGNTGYAQKFQG (SEQ ID NO: 236) | QQSKSIPIT (SEQ ID NO: 240) |
| | EGGRYSSGRLGY (SEQ ID NO: 237) | |
| TMPRSS4 | QVQLVQSGAEVKKPGASVKVSCKASGYTFTG | DIQMTQSPSSLSASVGDRVTITCQASQDISNY |
| Ab35 | YYMHWVRQAPGQGLEWMGKISAHSGETKYAQ | LNWYQQKPGKAPKLLIYKASSLESGVPSRFSG |
| | NVQGRVTMTRDTSTSTVYMELSSLRSEDTAV | SGSGTDFTLTISSLQPEDFATYYCQQTYTIPI |
| | YYCARANYYGDYVNYYYGMDVWGQGTTVTVS | TFGQGTRLEIK (SEQ ID NO: 242) |
| | S (SEQ ID NO: 241) | QASQDISNYLN (SEQ ID NO: 6) |
| | GYYMH (SEQ ID NO: 193) | KASSLES (SEQ ID NO: 7) |
| | KISAHSGETKYAQNVQG (SEQ ID NO: 243) | QQTYTIPIT (SEQ ID NO: 245) |
| | ANYYGDYVNYYYGMDV (SEQ ID NO: 244) | |
| TMPRSS4 | EVQLLESGGGLVQPGGSLRLSCAASGFTESS | DIQMTQSPSSLSASVGDRVTITCRASQSISTW |
| Ab36 | RAMSWVRQAPGKGLEWVSRINYDGSATTYAD | LAWYQQKPGKAPKLLIYRASNLQSGVPSRFSG |
| | SVKGRFTISRDNSKNTLYLQMNSLRAEDTAV | SGSGTDFTLTISSLQPEDFATYYCQQSYSTPL |
| | YYCARGITIFGVFDYWGQGTLVTVSS (SEQ | TFGGGTKVEIK (SEQ ID NO: 247) |
| | ID NO: 246) | RASQSISTWLA (SEQ ID NO: 292) |
| | SRAMS (SEQ ID NO: 248) | RASNLQS (SEQ ID NO: 251) |
| | RINYDGSATTYADSVKG (SEQ ID NO: 249) | QQSYSTPLT (SEQ ID NO: 252) |
| | GITIFGVFDY (SEQ ID NO: 250) | |
| TMPRSS4 | EVQLLESGGGLVQPGGSLRLSCAASGFTFSS | DIQMTQSPSSLSASVGDRVTITCRASQSISRY |
| Ab37 | YAMHWVRQAPGKGLEWVSYISSSGSTVYYAD | LNWYQQKPGKAPKLLIYSASTLQSGVPSRFSG |
| | SVKGRFTISRDNSKNTLYLQMNSLRAEDTAV | SGSGTDFTLTISSLQPEDFATYYCQQAHSFPP |
| | YYCARVSNVTPRSGFGYWGQGTLVTVSS | SFGQGTKLEIK (SEQ ID NO: 254) |
| | (SEQ ID NO: 253) | RASQSISRYLN (SEQ ID NO: 139) |
| | SYAMH (SEQ ID NO: 180) | SASTLQS (SEQ ID NO: 257) |
| | YISSSGSTVYYADSVKG (SEQ ID NO: 255) | QQAHSFPPS (SEQ ID NO: 258) |
| | VSNVTPRSGFGY (SEQ ID NO: 256) | |
| TMPRSS4 | QVQLAQSGAEVKKPGASVKVSCKASGYTFTR | DIQMTQSPSSLSASVGDRVTITCQASQDISRY |
| Ab38 | HYIQWVRQAPGQGLEWMGWINPNSGNTGYAQ | LNWYQQKPGKAPKLLIYGASNLLSGVPSRFSG |
| | KFQGRVTMTRDTSTSTVYMELSSLRSEDTAV | SGSGTDFTLTISSLQPEDFATYYCQQTHTTPY |
| | YYCARGRQWLRGEYFQHWGQGTLVTVSS | TFGQGTRLEIK (SEQ ID NO: 260) |
| | (SEQ ID NO: 259) | QASQDISRYLN (SEQ ID NO: 263) |
| | RHYIQ (SEQ ID NO: 261) | GASNLLS (SEQ ID NO: 264) |
| | WINPNSGNTGYAQKFQG (SEQ ID NO: 50) | QQTHTTPYT (SEQ ID NO: 265) |
| | GRQWLRGEYFQH (SEQ ID NO: 262) | |
| TMPRSS4 | QVQLVQSGAEVKKPGASVKVSCKASGGSFSG | DIQMTQSPSSLSASVGDRVTITCRASQGIRNW |
| Ab39 | YAVSWVRQAPGQGLEWLGVINPSDSWTAFAQ | LAWYQQKPGKAPKLLIYRASTLQSGVPSRFSG |
| | KFQGRVTMTRDTSTSTVYMELSSLRSEDTAV | SGSGTDFTLTISSLQPEDFATYYCQQSYTTPF |
| | YYCAREREDDAFDIWGQGTTVTVSS (SEQ ID | TFGQGTKLEIK (SEQ ID NO: 267) |
| | NO: 266) | RASQGIRNWLA (SEQ ID NO: 271) |
| | GYAVS (SEQ ID NO: 268) | RASTLQS (SEQ ID NO: 272) |
| | VINPSDSWTAFAQKFQG (SEQ ID NO: 269) | QQSYTTPFT (SEQ ID NO: 273) |
| | EREDDAFDI (SEQ ID NO: 270) | |
| TMPRSS4 | QVQLVQSGAEVKKPGASVKVSCKASGGTFSS | DIQMTQSPSSLSASVGDRVTITCRASQSISSY |
| Ab40 | YAISWVRQAPGQGLEWMGIINPRGGSTNYAQ | LNWYQQKPGKAPKLLIYAAYNLQSGVPSRFSG |
| | KFQGRVTMTRDTSTSTVYMELSSLRSEDTAV | SGSGTDFTLTISSLQPEDFATYYCQQSYSIPF |
| | YYCAREGSSWYYDAFDIWGQGTMVTVSS | TFGGGTKVEIK (SEQ ID NO: 275) |
| | (SEQ ID NO: 274) | RASQSISSYLN (SEQ ID NO: 278) |
| | SYAIS (SEQ ID NO: 220) | AAYNLQS (SEQ ID NO: 279) |
| | IINPRGGSTNYAQKFQG (SEQ ID NO: 276) | QQSYSIPFT (SEQ ID NO: 280) |
| | EGSSWYYDAFDI (SEQ ID NO: 277) | |
| TMPRSS4 | QVQLVQSGAEVKKPGASVKVSCKASGGTESS | DIQMTQSPSSLSASVGDRVTITCRASQSISRW |
| Ab41 | YAISWVRQAPGQGLEWMGWMNPNSGDTHYAQ | LAWYQQKPGKAPKLLIYAASTLQTGVPSRESG |
| | KFQGRVTMTRDTSTSTVYMELSSLRSEDTAV | SGSGTDFTLTISSLQPEDFATYYCLQHSSYPF |
| | YYCAREGSSWYYDAFDIWGQGTLVTVSS | TFGQGTKVEIK (SEQ ID NO: 282) |
| | (SEQ ID NO: 281) | RASQSISRWLA (SEQ ID NO: 284) |
| | SYAIS (SEQ ID NO: 220) | AASTLQT (SEQ ID NO: 239) |
| | WMNPNSGDTHYAQKFQG (SEQ ID NO: 283) | LQHSSYPFT (SEQ ID NO: 285) |
| | EGSSWYYDAFDI (SEQ ID NO: 277) | |
| TMPRSS4 | QVQLVQSGAEVKKPGASVKVSCKASGYSFTS | DIQMTQSPSSLSASVGDRVTITCRASQSIRNY |
| Ab42 | HYMHWVRQAPGQGLEWMGWMNPNSGNTGYAQ | LNWYQQKPGKAPKLLIYEASRLQSGVPSRFSG |
| | KFQGRVTMTRDTSTSTVYMELSSLRSEDTAV | SGSGTDFTLTISSLQPEDFATYYCQQSYSAPP |
| | YYCARLGQQLDYWGQGTLVTVSS (SEQ ID | TFGPGTKVDIK (SEQ ID NO: 287) |
| | NO: 286) | RASQSIRNYLN (SEQ ID NO: 290) |
| | SHYMH (SEQ ID NO: 288) | EASRLQS (SEQ ID NO: 291) |
| | WMNPNSGNTGYAQKFQG (SEQ ID NO: 194) | QQSYSAPPT (SEQ ID NO: 293) |
| | LGQQLDY (SEQ ID NO: 289) | |
| TMPRSS4 | QVQLVQSGAEVKKPGASVKVSCKASGYTFIG | DIQMTQSPSSLSASVGDRVTITCQASQDISNY |
| Ab43 | YYMHWVRQAPGQGLEWMGRINPNSGETNYAQ | LNWYQQKPGKAPKLLIYAASSLQSGVPSRFSG |
| | KFQGRVTMTRDTSTSTVYMELSSLRSEDTAV | SGSGTDFTLTISSLQPEDFATYYCQQSYSTPV |
| | YYCARVRVRGVIHPGFDPWGQGTLVTVSS | TFGPGTKVDIK (SEQ ID NO: 295) |
| | (SEQ ID NO: 294) | QASQDISNYLN (SEQ ID NO: 6) |
| | GYYMH (SEQ ID NO: 296) | AASSLQS (SEQ ID NO: 15) |
| | RINPNSGETNYAQKFQG (SEQ ID NO: 297) | QQSYSTPVT (SEQ ID NO: 152) |
| | VRVRGVIHPGFDP (SEQ ID NO: 298) | |
| TMPRSS4 | QVQLVQSGAEVKKPGASVKVSCKASGYTFRN | DIQMTQSPSSLSASVGDRVTITCQASQDISNY |
| Ab44 | YYIHWVRQAPGQGLEWMGRINPNSGGTNYAQ | LNWYQQKPGKAPKLLIYAASSLHSGVPSRFSG |
| | KFQGRVTMTRDTSTSTVYMELSSLRSEDTAV | SGSGTDFTLTISSLQPEDFATYYCQESSSFPY |
| | YYCARARIAVAVSGFGYWGQGTLVTVSS | TFGPGTKVDIK (SEQ ID NO: 300) |
| | (SEQ ID NO: 299) | QASQDISNYLN (SEQ ID NO: 6) |
| | NYYIH (SEQ ID NO: 301) | AASSLHS (SEQ ID NO: 303) |
| | RINPNSGGTNYAQKFQG (SEQ ID NO: 80) | QESSSFPYT (SEQ ID NO: 304) |
| | ARIAVAVSGEGY (SEQ ID NO: 302) | |
| TMPRSS4 | QVQLVQSGAEVKKPGASVKVSCKASGYTFSR | DIQMTQSPSSLSASVGDRVTITCQATQDIRNY |
| Ab45 | WYMHWVRQAPGQGLEWMGRINPNSGGTNYAQ | LNWYQQKPGKAPKLLIYATSSLQSGVPSRFSG |
| | KFQGRVTMTRDTSTSTVYMELSSLRSEDTAV | SGSGTDFTLTISSLQPEDFATYYCQQSYSPPY |
| | YYCARVGGYGWFDPWGQGTLVTVSS (SEQ ID | TFGQGTKLEIK (SEQ ID NO: 306) |
| | NO: 305) | QATQDIRNYLN (SEQ ID NO: 309) |
| | RWYMH (SEQ ID NO: 307) | ATSSLQS (SEQ ID NO: 310) |
| | RINPNSGGTNYAQKFQG (SEQ ID NO: 80) | QQSYSPPYT (SEQ ID NO: 311) |
| | VGGYGWFDP (SEQ ID NO: 308) | |
| TMPRSS4 | QVQLVQSGAEVKKPGASVKVSCKASGYTFSR | DIQMTQSPSSLSASVGDRVTITCRASQSISTW |
| Ab46 | YFMHWVRQAPGQGLEWMGWINPNSGGTNYAQ | LAWYQQKPGKAPKLLIYAASSLQSGVPSRFSG |
| | KFQGRVTMTRDTSTSTVYMELSSLRSEDTAV | SGSGTDFTLTISSLQPEDFATYYCQQSYGFPW |
| | YYCARVRIGWLQSPPLYWGQGTLVTVSS | TFGQGTKVEIK (SEQ ID NO: 313) |
| | (SEQ ID NO: 312) | RASQSISTWLA (SEQ ID NO: 292) |
| | RYFMH (SEQ ID NO: 49) | AASSLQS (SEQ ID NO: 15) |
| | WINPNSGGTNYAQKFQG (SEQ ID NO: 66) | QQSYGFPWT (SEQ ID NO: 314) |
| | VRIGWLQSPPLY (SEQ ID NO: 110) | |
| TMPRSS4 | QVQLVQSGAEVKKPGASVKVSCKASGYTFTG | DIQMTQSPSSLSASVGDRVTITCRASQSISSY |
| Ab47 | YFMHWVRQAPGQGLEWMGWMNPNSGNTGYAQ | LNWYQQKPGKAPKLLIYAASSLQSGVPSRFSG |
| | KFQGRVTMTRDTSTSTVYMELSSLRSEDTAV | SGSGTDFTLTISSLQPEDFATYYCQQSYSTPL |
| | YYCVRGRTWIQSSLGYWGQGTLVTVSS (SEQ | TFGGGTKVEIK (SEQ ID NO: 316) |
| | ID NO: 315) | RASQSISSYLN (SEQ ID NO: 278) |
| | GYFMH (SEQ ID NO: 317) | AASSLQS (SEQ ID NO: 15) |
| | WMNPNSGNTGYAQKFQG (SEQ ID NO: 194) | QQSYSTPLT (SEQ ID NO: 252) |
| | GRTWIQSSLGY (SEQ ID NO: 318) | |
| TMPRSS4 | QVQLVQSGAEVKKPGASVKVSCKASGYTFTG | DIQMTQSPSSLSASVGDRVTITCRASQGISNY |
| Ab48 | YYLHWVRQAPGQGLEWMGWISAYNGNTNYAQ | LAWYQQKPGKAPKLLIYTASTLFPGVPSRFSG |
| | NLQGRVTMTRDTSTSTVYMELSSLRSEDTAV | SGSGTDFTLTISSLQPEDFATYYCQQSYSIPL |
| | YYCARHSYSGSYSTLPYYGMDVWGQGTTVTV | TFGGGTKVEIK (SEQ ID NO: 320) |
| | SS (SEQ ID NO: 319) | RASQGISNYLA (SEQ ID NO: 324) |
| | GYYLH (SEQ ID NO: 321) | TASTLEP (SEQ ID NO: 325) |
| | WISAYNGNTNYAQNLQG (SEQ ID NO: 322) | QQSYSIPLT (SEQ ID NO: 16) |
| | HSYSGSYSTLPYYGMDV (SEQ ID NO: 323) | |
| TMPRSS4 | QVQLVQSGAEVKKPGASVKVSCKASGYTFTG | DIQMTQSPSSLSASVGDRVTITCRASQSISNW |
| Ab49 | YYMHWVRQAPGQGLEWMGRINPNSGGTNYAQ | LAWYQQKPGKAPKLLIYAASTLQNGVPSRFSG |
| | KFQGRVTMTRDTSTSTVYMELSSLRSEDTAV | SGSGTDFTLTISSLQPEDFATYYCQQSYTFPI |
| | YYCARERAGYSSGQFDYWGQGTLVTVSS | TFGQGTKVEIK (SEQ ID NO: 327) |
| | (SEQ ID NO: 326) | RASQSISNWLA (SEQ ID NO: 329) |
| | GYYMH (SEQ ID NO: 193) | AASTLQN (SEQ ID NO: 330) |
| | RINPNSGGTNYAQKFQG (SEQ ID NO: 80) | QQSYTFPIT (SEQ ID NO: 331) |
| | ERAGYSSGQFDY (SEQ ID NO: 328) | |
| TMPRSS4 | QVQLVQSGAEVKKPGASVKVSCKASGYTFTG | DIQMTQSPSSLSASVGDRVTITCRASQGISNY |
| Ab50 | YYMHWVRQAPGQGLEWMGWINPNSGGTHYAQ | LAWYQQKPGKAPKLLIYATSRLQSGVPSRFSG |
| | KFQGRVTMTRDTSTSTVYMELSSLRSEDTAV | SGSGTDFTLTISSLQPEDFATYYCQQSYKTPL |
| | YYCARVRIGWLQSPPLYWGQGTLVTVSS | TFGGGTKVEIK (SEQ ID NO: 333) |
| | (SEQ ID NO: 332) | RASQGISNYLA (SEQ ID NO: 324) |
| | GYYMH (SEQ ID NO: 193) | ATSRLQS (SEQ ID NO: 335) |
| | WINPNSGGTHYAQKFQG (SEQ ID NO: 334) | QQSYKTPLT (SEQ ID NO: 336) |
| | VRIGWLQSPPLY (SEQ ID NO: 110) | |
| TMPRSS4 | QVQLVQSGAEVKKPGASVKVSCKASGYTFTN | DIQMTQSPSSLSASVGDRVTITCRASQSISSY |
| Ab51 | YYMHWVRQAPGQGLEWMGWINPKSGGTSYAQ | LNWYQQKPGKAPKLLIYAASSLQSGVPSRFSG |
| | KFQGRVTMTRDTSTSTVYMELSSLRSEDTAV | SGSGTDFTLTISSLQPEDFATYYCQQSYSTPL |
| | YYCASGKQWLVGGRFDYWGQGTLVTVSS | TFGGGTKVEIK (SEQ ID NO: 316) |
| | (SEQ ID NO: 337) | RASQSISSYLN (SEQ ID NO: 278) |
| | NYYMH (SEQ ID NO: 93) | AASSLQS (SEQ ID NO: 15) |
| | WINPKSGGTSYAQKFQG (SEQ ID NO: 338) | QQSYSTPLT (SEQ ID NO: 252) |
| | GKQWLVGGRFDY (SEQ ID NO: 339) | |
| TMPRSS4 | QVQLVQSGAEVKKPGASVKVSCKASGYTFTR | DIQMTQSPSSLSASVGDRVTITCRASQGISRW |
| Ab52 | YYIHWVRQAPGQGLEWMGWMNPNSGNTGFAQ | LGWYQQKPGKAPKLLIYGASNLQTGVPSRFSG |
| | KLQGRVTMTRDTSTSTVYMELSSLRSEDTAV | SGSGTDFTLTISSLQPEDFATYYCQQSYSSPR |
| | YYCARGPFPRGRLDLWGQGTLVTVSS (SEQ | TFGQGTKVEIK (SEQ ID NO: 341) |
| | ID NO: 340) | RASQGISRWLG (SEQ ID NO: 345) |
| | RYYIH (SEQ ID NO: 342) | GASNLQT (SEQ ID NO: 90) |
| | WMNPNSGNTGFAQKLQG (SEQ ID NO: 343) | QQSYSSPRT (SEQ ID NO: 346) |
| | GPFPRGRLDL (SEQ ID NO: 344) | |
| TMPRSS4 | QVQLVQSGAEVKKPGASVKVSCKASGYTFTR | DIQMTQSPSSLSASVGDRVTITCRASRSINRW |
| Ab53 | YYMHWVRQAPGQGLEWMGIINPTGGSTSYAQ | LAWYQQKPGKAPKLLIYGASTLQSGVPSRFSG |
| | KFQGRVTMTRDTSTSTVYMELSSLRSEDTAV | SGSGTDFTLTISSLQPEDFATYYCQQSYSTPT |
| | YYCARGRTWIQSSLGYWGQGTLVTVSS (SEQ | FGGGTKVEIK (SEQ ID NO: 348) |
| | ID NO: 347) | RASRSINRWLA (SEQ ID NO: 350) |
| | RYYMH (SEQ ID NO: 65) | GASTLQS (SEQ ID NO: 351) |
| | IINPTGGSTSYAQKFQG (SEQ ID NO: 349) | QQSYSTPT (SEQ ID NO: 352) |
| | GRTWIQSSLGY (SEQ ID NO: 229) | |
| TMPRSS4 | QVQLVQSGAEVKKPGASVKVSCKASGYTFTS | DIQMTQSPSSLSASVGDRVTITCRASQGISNY |
| Ab54 | YYMQWVRQAPGQGLEWMGWMNPNSGNTGYAQ | LAWYQQKPGKAPKLLIYAASSLQSGVPSRFSG |
| | KFQGRVTMTRDTSTSTVYMELSSLRSEDTAV | SGSGTDFTLTISSLQPEDFATYYCQQSYSIPF |
| | YYCARVRIGWLQSPPLYWGQGTLVTVSS | TFGPGTKVDIK (SEQ ID NO: 354) |
| | (SEQ ID NO: 353) | RASQGISNYLA (SEQ ID NO: 324) |
| | SYYMQ (SEQ ID NO: 355) | AASSLQS (SEQ ID NO: 15) |
| | WMNPNSGNTGYAQKFQG (SEQ ID NO: 194) | QQSYSIPFT (SEQ ID NO: 280) |
| | VRIGWLQSPPLY (SEQ ID NO: 110) | |
| TMPRSS4 | QVQLVQSGAEVKKPGASVKVSCKASGYTFTT | DIQMTQSPSSLSASVGDRVTITCRASQSISSW |
| Ab55 | YYMHWVRQAPGQGLEWMGIINPSGGSTSYAQ | LAWYQQKPGKAPKLLIYAASSLQSGVPSRFSG |
| | KFQGRVTMTRDTSTSTVYMELSSLRSEDTAV | SGSGTDFTLTISSLQPEDFATYYCQQSYSTPR |
| | YYCARGRSWYRSNVDYWGQGTLVTVSS (SEQ | TFGQGTRLEIK (SEQ ID NO: 357) |
| | ID NO: 356) | RASQSISSWLA (SEQ ID NO: 60) |
| | TYYMH (SEQ ID NO: 207) | AASSLQS (SEQ ID NO: 15) |
| | IINPSGGSTSYAQKFQG (SEQ ID NO: 58) | QQSYSTPRT (SEQ ID NO: 359) |
| | GRSWYRSNVDY (SEQ ID NO: 358) | |
| TMPRSS4 | QVQLVQSGAEVKKPGASVKVSCKASGHTFTR | DIVMTQSPLSLPVTPGEPASISCRSSQSLLHS |
| Ab56 | YYMHWVRQAPGQGLEWMGWINPNSGNTGDAQ | NGYNYLDWYLQKPGQSPQLLIYLGSNRASGVP |
| | KFQGRVTMTRDTSTSTVYMELSSLRSEDTAV | DRFSGSGSGTDFTLKISRVEAEDVGVYYCMQA |
| | YYCARDRGIVVVPAAIGGMDVWGQGTMVTVS | LQTPITFGQGTRLEIK (SEQ ID NO: 361) |
| | S (SEQ ID NO: 360) | RSSQSLLHSNGYNYLD (SEQ ID NO: 29) |
| | RYYMH (SEQ ID NO: 362) | LGSNRAS (SEQ ID NO: 203) |
| | WINPNSGNTGDAQKFQG (SEQ ID NO: 363) | MQALQTPIT (SEQ ID NO: 365) |
| | DRGIVVVPAAIGGMDV (SEQ ID NO: 364) | |
| TMPRSS4 | QVQLVQSGAEVKKPGASVKVSCKASGYTFTG | DIVMTQSPLSLPVTPGEPASISCRSSQSLLHS |
| Ab57 | YFMHWVRQAPGQGLEWMGRINPNSGGTNYAQ | NGYNYLDWYLQKPGQSPQLLIYLGSNRASGVP |
| | KFQGRVTMTRDTSTSTVYMELSSLRSEDTAV | DRFSGSGSGTDFTLKISRVEAEDVGVYYCMQG |
| | YYCARGKGRYFDLWGRGTLVTVSS (SEQ ID | THWPITFGQGTRLEIK (SEQ ID NO: 367) |
| | NO: 366) | RSSQSLLHSNGYNYLD (SEQ ID NO: 29) |
| | GYFMH (SEQ ID NO: 317) | LGSNRAS (SEQ ID NO: 203) |
| | RINPNSGGTNYAQKFQG (SEQ ID NO: 80) | MQGTHWPIT (SEQ ID NO: 369) |
| | GKGRYFDL (SEQ ID NO: 368) | |
| TMPRSS4 | QVQLVQSGAEVKKPGASVKVSCKASGYTFTR | DIVMTQSPLSLPVTPGEPASISCRSSQSLLHS |
| Ab58 | YYLHWVRQAPGQGLEWMGWVSAYNGNTNYAQ | NGYNYLDWYLQKPGQSPQLLIYLGSNRASGVP |
| | KFQGRVTMTRDTSTSTVYMELSSLRSEDTAV | DRFSGSGSGTDFTLKISRVEAEDVGVYYCMQA |
| | YYCARGYCSGGSCYWFDPWGQGTLVTVSS | LQTPLTFGQGTKVEIK (SEQ ID NO: 371) |
| | (SEQ ID NO: 370) | RSSQSLLHSNGYNYLD (SEQ ID NO: 29) |
| | RYYLH (SEQ ID NO: 372) | LGSNRAS (SEQ ID NO: 203) |
| | WVSAYNGNTNYAQKFQG (SEQ ID NO: 373) | MQALQTPLT (SEQ ID NO: 375) |
| | GYCSGGSCYWFDP (SEQ ID NO: 374) | |
| TMPRSS4 | QVQLVQSGAEVKKPGASVKVSCKASGGTFSS | EIVMTQSPATLSVSPGERATLSCRASQSVSSN |
| Ab59 | YTLSWVRQAPGQGLEWMGWIHPKSGVTKNAQ | YLAWYQQKPGQAPRLLIYGASTRATGIPARFS |
| | KFQGRVTMTRDTSTSTVYMELSSLRSEDTAV | GSGSGTEFTLTISSLQSEDFAVYYCQQYGTLP |
| | YYCARGWVYGRMDAWGQGTTVTVSS (SEQ ID | YTFGQGTKVEIK (SEQ ID NO: 377) |
| | NO: 376) | RASQSVSSNYLA (SEQ ID NO: 175) |
| | SYTLS (SEQ ID NO: 378) | GASTRAT (SEQ ID NO: 38) |
| | WIHPKSGVTKNAQKFQG (SEQ ID NO: 379) | QQYGTLPYT (SEQ ID NO: 381) |
| | GWVYGRMDA (SEQ ID NO: 380) | |
| TMPRSS4 | QVQLVQSGAEVKKPGASVKVSCKASGYSFTT | EIVMTQSPATLSVSPGERATLSCRASQSVSSN |
| Ab60 | YYIHWVRQAPGQGLEWMGIINPSGGSTSYAQ | TLAWYQQKPGQAPRLLIYGASTRATGIPARFS |
| | KFQGRVTMTRDTSTSTVYMELSSLRSEDTAV | GSGSGTEFTLTISSLQSEDFAVYYCQQYGSSP |
| | YYCARGGYYGSGYNSVGYWGPGTLVTVSS | LTFGPGTKVDIK (SEQ ID NO: 383) |
| | (SEQ ID NO: 382) | RASQSVSSNTLA (SEQ ID NO: 386) |
| | TYYIH (SEQ ID NO: 384) | GASTRAT (SEQ ID NO: 38) |
| | IINPSGGSTSYAQKFQG (SEQ ID NO: 58) | QQYGSSPLT (SEQ ID NO: 387) |
| | GGYYGSGYNSVGY (SEQ ID NO: 385) | |
| TMPRSS4 | QVQLVQSGAEVKKPGASVKVSCKASGYTFTN | EIVMTQSPATLSVSPGERATLSCRASQSVSSY |
| Ab61 | YYMHWVRQAPGQGLEWMGWMNPNSGNTGYAQ | LAWYQQKPGQAPRLLIYGASTRATGIPARFSG |
| | NLQGRVTMTRDTSTSTVYMELSSLRSEDTAV | SGSGTEFTLTISSLQSEDFAVYYCQQYDISVT |
| | YYCARGRTWFRSGMDVWGQGTTVTVSS (SEQ | FGPGTKVDIK (SEQ ID NO: 389) |
| | ID NO: 388) | RASQSVSSYLA (SEQ ID NO: 75) |
| | NYYMH (SEQ ID NO: 93) | GASTRAT (SEQ ID NO: 38) |
| | WMNPNSGNTGYAQNLQG (SEQ ID NO: 390) | QQYDISVT (SEQ ID NO: 391) |
| | GRTWFRSGMDV (SEQ ID NO: 163) | |
| TMPRSS4 | QVQLVQSGAEVKKPGASVKVSCKASGYTFTD | DIVMTQSPDSLAVSLGERATINCKSSQSVLYS |
| Ab62 | YYIHWVRQAPGQGLEWMGWISTYNGNTNYAQ | SNNKNYLAWYQQKPGQPPKLLIYWASTRESGV |
| | KLQGRVTMTRDTSTSTVYMELSSLRSEDTAV | PDRFSGSGSGTDFTLTISSLQAEDVAVYYCQQ |
| | YYCARGMVRGMDVWGQGTMVTVSS (SEQ ID | YYTTPWTFGQGTRLEIK (SEQ ID NO: 393) |
| | NO: 392) | KSSQSVLYSSNNKNYLA (SEQ ID NO: 44) |
| | DYYIH (SEQ ID NO: 394) | WASTRES (SEQ ID NO: 45) |
| | WISTYNGNTNYAQKLQG (SEQ ID NO: 395) | QQYYTTPWT (SEQ ID NO: 397) |
| | GMVRGMDV (SEQ ID NO: 396) | |
| TMPRSS4 | QVQLVQSGAEVKKPGASVKVSCKASGYTFTG | DIVMTQSPDSLAVSLGERATINCKSSQSVLYS |
| Ab63 | YRMHWVRQAPGQGLEWMGVINPNTGTARFAQ | SNNKNYLAWYQQKPGQPPKLLIYWASTRESGV |
| | KFQGRVTMTRDTSTSTVYMELSSLRSEDTAV | PDRFSGSGSGTDFTLTISSLQAEDVAVYYCQQ |
| | YYCASVGVYWYFDLWGRGTLVTVSS (SEQ ID | YYSAPLTFGGGTKVEIK (SEQ ID NO: 399) |
| | NO: 398) | KSSQSVLYSSNNKNYLA (SEQ ID NO: 44) |
| | GYRMH (SEQ ID NO: 400) | WASTRES (SEQ ID NO: 45) |
| | VINPNTGTARFAQKFQG (SEQ ID NO: 401) | QQYYSAPLT (SEQ ID NO: 403) |
| | VGVYWYFDL (SEQ ID NO: 402) | |
| TMPRSS4 | QVQLVQSGAEVKKPGASVKVSCKASGYTFTG | DIVMTQSPDSLAVSLGERATINCKSSQSVLYS |
| Ab64 | YYMHWVRQAPGQGLEWMGMINPSGGGTTYAQ | SNNKNYLAWYQQKPGQPPKLLIYWASTRESGV |
| | KFQGRVTMTRDTSTSTVYMELSSLRSEDTAV | PDRFSGSGSGTDFTLTISSLQAEDVAVYYCQQ |
| | YYCARDRRSMITFRTDYWGQGTLVTVSS | YYSTPYTFGQGTKLEIK (SEQ ID NO: 405) |
| | (SEQ ID NO: 404) | KSSQSVLYSSNNKNYLA (SEQ ID NO: 44) |
| | GYYMH (SEQ ID NO: 193) | WASTRES (SEQ ID NO: 45) |
| | MINPSGGGTTYAQKFQG (SEQ ID NO: 406) | QQYYSTPYT (SEQ ID NO: 408) |
| | DRRSMITFRTDY (SEQ ID NO: 407) | |
| TMPRSS4 | QVQLVQSGAEVKKPGASVKVSCKASGYTFTG | DIVMTQSPDSLAVSLGERATINCKSSQSVLYS |
| Ab65 | YYMHWVRQAPGQGLEWMGWMNPNSGNTGYAQ | SNNKNYLAWYQQKPGQPPKLLIYWASTRQSGV |
| | KFQGRVTMTRDTSTSTVYMELSSLRSEDTAV | PDRFSGSGSGTDFTLTISSLQAEDVAVYYCQQ |
| | YYCAGRKWLGLDFYNWFDPWGQGTLVTVSS | YYSTPWTFGQGTKVEIK (SEQ ID NO: 410) |
| | (SEQ ID NO: 409) | KSSQSVLYSSNNKNYLA (SEQ ID NO: 44) |
| | GYYMH (SEQ ID NO: 193) | WASTRQS (SEQ ID NO: 412) |
| | WMNPNSGNTGYAQKFQG (SEQ ID NO: 194) | QQYYSTPWT (SEQ ID NO: 413) |
| | RKWLGLDFYNWFDP (SEQ ID NO: 411) | |
| TMPRSS4 | QVQLVQSGAEVKKPGSSVKVSCKASGGTFSS | EIVMTQSPATLSVSPGERATLSCRASQSVNSR |
| Ab66 | YAISWVRQAPGQGLEWVGGIMPIFGTANYAQ | FLAWYQQKPGQAPRLLIYGASTRATGIPARFS |
| | KFQGRVTITADESPSTAYMELSSLRSEDTAV | GSGSGTEFTLTISSLQSEDFAVYYCMQGTHWP |
| | YYCATGRRELLNWGQGTLVTVSS (SEQ ID | YTFGQGTKVEIK (SEQ ID NO: 415) |
| | NO: 414) | RASQSVNSRFLA (SEQ ID NO: 418) |
| | SYAIS (SEQ ID NO: 220) | GASTRAT (SEQ ID NO: 38) |
| | GIMPIFGTANYAQKFQG (SEQ ID NO: 416) | MQGTHWPYT (SEQ ID NO: 419) |
| | GRRELLN (SEQ ID NO: 417) | |
| TMPRSS4 | QVQLVQSGAEVKKPGSSVKVSCKASGYTFTS | DIVMTQSPDSLAVSLGERATINCKSSQSVLYS |
| Ab67 | YDINWVRQAPGQGLEWMGGIIPIFGTANYAQ | SNNKNYLAWYQQKPGQPPKLLIYWASTRESGV |
| | KFQGRVTITADESTSTAYMELSSLRSEDTAV | PDRFSGSGSGTDFTLTISSLQAEDVAVYYCQQ |
| | YYCATTPGDAFDIWGQGTMVTVSS (SEQ ID | YSDTPLTFGQGTKVEIK (SEQ ID NO: 421) |
| | NO: 420) | KSSQSVLYSSNNKNYLA (SEQ ID NO: 44) |
| | SYDIN (SEQ ID NO: 19) | WASTRES (SEQ ID NO: 45) |
| | GIIPIFGTANYAQKFQG (SEQ ID NO: 4) | QQYSDTPLT (SEQ ID NO: 423) |
| | TPGDAFDI (SEQ ID NO: 422) | |
| TMPRSS4 | EVQLLESGGGLVKPGGSLRLSCAASGFTFSS | DIQMTQSPSSLSASVGDRVTITCRASQSISRY |
| Ab68 | SWMHWVRQAPGKGLEWVSAIGTAGDTYYPGS | LNWYQQKPGKAPKLLIYAASSLQSGVPSRFSG |
| | VKGRFTISRDDSKNTLYLQMNSLKTEDTAVY | SGSGTDFTLTISSLQPEDFATYYCQQSYSNPP |
| | YCARVRLGHFDLWGRGTLVTVSS (SEQ ID | TFGQGTKLEIK (SEQ ID NO: 425) |
| | NO: 424) | RASQSISRYLN (SEQ ID NO: 139) |
| | SSWMH (SEQ ID NO: 426) | AASSLQS (SEQ ID NO: 15) |
| | AIGTAGDTYYPGSVKG (SEQ ID NO: 427) | QQSYSNPPT (SEQ ID NO: 429) |
| | VRLGHFDL (SEQ ID NO: 428) | |
| TMPRSS4 | EVQLLESGGGLVQHGGSLRLSCAASGFAFSS | DIQMTQSPSSLSASVGDRVTITCRASQGISSW |
| Ab69 | YVLHWVRQAPGKGLEWVSSISSSSSYIYYAD | LAWYQQKPGKAPKLLIYQASNKDTGVPSRFSG |
| | SVKGRFTISRDNSKNTLYLQMNSLRAEDTAV | SGSGTDFTLTISSLQPEDFATYYCQQSYRIPW |
| | YYCARGDRYPGLPNYWGQGTLVTVSS (SEQ | TFGQGTKVEIK (SEQ ID NO: 431) |
| | ID NO: 430) | RASQGISSWLA (SEQ ID NO: 238) |
| | SYVLH (SEQ ID NO: 432) | QASNKDT (SEQ ID NO: 435) |
| | SISSSSSYIYYADSVKG (SEQ ID NO: 433) | QQSYRIPWT (SEQ ID NO: 436) |
| | GDRYPGLPNY (SEQ ID NO: 434) | |
| TMPRSS4 | EVQLLESGGGLVQPGGSLRLSCAASGFAFSG | DIQMTQSPSSLSASVGDRVTITCRASQSISGW |
| Ab70 | TWMQWVRQAPGKGLEWVSDISGSSRDTNYAD | LAWYQQKPGKAPKLLIYAASTLRDGVPSRFSG |
| | SVKGRFTISRDNSKNTLYLQMNSLRAEDTAV | SGSGTDFTLTISSLQPEDFATYYCQQANSFPL |
| | YYCAKDHWDSYGYLDYWGQGTLVTVSS (SEQ | TFGQGTKVEIK (SEQ ID NO: 438) |
| | ID NO: 437) | RASQSISGWLA (SEQ ID NO: 442) |
| | GTWMQ (SEQ ID NO: 439) | AASTLRD (SEQ ID NO: 443) |
| | DISGSSRDTNYADSVKG (SEQ ID NO: 440) | QQANSFPLT (SEQ ID NO: 444) |
| | DHWDSYGYLDY (SEQ ID NO: 441) | |
| TMPRSS4 | EVQLLESGGGLVQPGGSLRLSCAASGFMFDY | DIQMTQSPSSLSASVGDRVTITCRASQGISNN |
| Ab71 | YAMHWVRQAPGKGLEWVSLISYDGRNKYYAD | LNWYQQKPGKAPKLLIYAASSLQSGVPSRFSG |
| | SVKGRFTISRDNSKNTLYLQMNSLRAEDTAV | SGSGTDFTLTISSLQPEDFATYYCQQANNFPI |
| | YYCARPGSYSRFQHWGQGTLVTVSS (SEQ ID | TFGQGTKVEIK (SEQ ID NO: 446) |
| | NO: 445) | RASQGISNNLN (SEQ ID NO: 450) |
| | YYAMH (SEQ ID NO: 447) | AASSLQS (SEQ ID NO: 15) |
| | LISYDGRNKYYADSVKG (SEQ ID NO: 448) | QQANNFPIT (SEQ ID NO: 451) |
| | PGSYSRFQH (SEQ ID NO: 449) | |
| TMPRSS4 | EVQLLESGGGLVQPGGSLRLSCAASGFTFGA | DIQMTQSPSSLSASVGDRVTITCRASQNISRW |
| Ab72 | YVMHWVRQAPGKGLEWVSSISGGSTYYADSV | LAWYQQKPGKAPKLLIYAASSLQSGVPSRFSG |
| | KGRFTISRDNSKNTLYLQMNSLRAEDTAVYY | SGSGTDFTLTISSLQPEDFATYYCQQAISFPL |
| | CARHPVRGVIGAGWFDPWGQGTLVTVSS | TFGGGTKVEIK (SEQ ID NO: 453) |
| | (SEQ ID NO: 452) | RASQNISRWLA (SEQ ID NO: 457) |
| | AYVMH (SEQ ID NO: 454) | AASSLQS (SEQ ID NO: 15) |
| | SISGGSTYYADSVKG (SEQ ID NO: 455) | QQAISFPLT (SEQ ID NO: 112) |
| | HPVRGVIGAGWFDP (SEQ ID NO: 456) | |
| TMPRSS4 | EVQLLESGGGLVQPGGSLRLSCAASGFTFSS | DIQMTQSPSSLSASVGDRVTITCRASQGISNS |
| Ab73 | YAMHWVRQAPGKGLEWLAVISEDGSIRHYAD | LAWYQQKPGKAPKLLIYSAVNLQSGVPSRFSG |
| | SVKGRFTISRDNSKNTLYLQMNSLRAEDTAV | SGSGTDFTLTISSLQPEDFATYYCQQANSFPL |
| | YYCAKPKASSGPRLIDYWGQGTLVTVSS | TFGGGTKVEIK (SEQ ID NO: 459) |
| | (SEQ ID NO: 458) | RASQGISNSLA (SEQ ID NO: 462) |
| | SYAMH (SEQ ID NO: 180) | SAVNLQS (SEQ ID NO: 463) |
| | VISFDGSIRHYADSVKG (SEQ ID NO: 460) | QQANSFPLT (SEQ ID NO: 464) |
| | PKASSGPRLIDY (SEQ ID NO: 461) | |
| TMPRSS4 | EVQLLESGGGLVQPGGSLRLSCAASGFTFSS | DIQMTQSPSSLSASVGDRVTITCRASQSVSSW |
| Ab74 | YAMHWVRQAPGKGLEWVSSISSSSTYIHYAD | LAWYQQKPGKAPKLLIYDASSLQSGVPSRFSG |
| | SVKGRFTISRDNSKNTLYLQMNSLRAEDTAV | SGSGTDFTLTISSLQPEDFATYYCQQAKSFPP |
| | YYCARVGRYYGSGSSLVDYWGQGTLVTVSS | TFGQGTKVEIK (SEQ ID NO: 466) |
| | (SEQ ID NO: 465) | RASQSVSSWLA (SEQ ID NO: 469) |
| | SYAMH (SEQ ID NO: 180) | DASSLQS (SEQ ID NO: 470) |
| | SISSSSTYIHYADSVKG (SEQ ID NO: 467) | QQAKSFPPT (SEQ ID NO: 471) |
| | VGRYYGSGSSLVDY (SEQ ID NO: 468) | |
| TMPRSS4 | EVQLLESGGGLVQPGGSLRLSCAASGFTESS | DIQMTQSPSSLSASVGDRVTITCRASQGIRND |
| Ab75 | YAMSWVRQAPGKGLEWVSSISSASSYKYYAD | LNWYQQKPGKAPKLLIYAATRLQSGVPSRFSG |
| | SVKGRFTISRDNSKNTLYLQMNSLRAEDTAV | SGSGTDFTLTISSLQPEDFATYYCQQAHSFPY |
| | YYCARDIYSSGWRGYYYYGMDVWGQGTTVTV | SFGQGTRLEIK (SEQ ID NO: 473) |
| | SS (SEQ ID NO: 472) | RASQGIRNDLN (SEQ ID NO: 477) |
| | SYAMS (SEQ ID NO: 474) | AATRLQS (SEQ ID NO: 478) |
| | SISSASSYKYYADSVKG (SEQ ID NO: 475) | QQAHSFPYS (SEQ ID NO: 479) |
| | DIYSSGWRGYYYYGMDV (SEQ ID NO: 476) | |
| TMPRSS4 | EVQLLESGGGLVQPGGSLRLSCAASGFTFSS | DIVMTQSPDSLAVSLGERATINCKSSQSVLYS |
| Ab76 | YAMSWVRQAPGKGLEWVSAISGSGGNAYYAD | SNNKNYLAWYQQKPGQPPKLLIYWASTRASGV |
| | SVKGRFTISRDNAKNSLYLQMNSLRAEDTAV | PDRFSGSGSGTDFTLTISSLQAEDVAVYYCQQ |
| | YYCAKNSWGSYRPRAFDIWGQGTMVTVSS | YLSLPYTFGQGTKVEIK (SEQ ID NO: 481) |
| | (SEQ ID NO: 480) | KSSQSVLYSSNNKNYLA (SEQ ID NO: 44) |
| | SYAMS (SEQ ID NO: 474) | WASTRAS (SEQ ID NO: 484) |
| | AISGSGGNAYYADSVKG (SEQ ID NO: 482) | QQYLSLPYT (SEQ ID NO: 485) |
| | NSWGSYRPRAFDI (SEQ ID NO: 483) | |
| TMPRSS4 | QVQLVQSGAEVKKPGASVKVSCKASGNIFTA | DIVMTQSPDSLAVSLGERATINCKSSQSVLYS |
| Ab77 | QYMHWVRQAPGQGLEWMGWMNPNTVYTGSAQ | SNNKNYLAWYQQKPGQPPKLLIYWASTRESGV |
| | KFQGRVTMTRDTSTSTVYMELSSLRSEDTAV | PDRFSGSGSGTDFTLTISSLQAEDVAVYYCQQ |
| | YYCARDWVGDGYNSFDYWGQGTLVTVSS | YYTTPFTFGPGTKVDIK (SEQ ID NO: 487) |
| | (SEQ ID NO: 486) | KSSQSVLYSSNNKNYLA (SEQ ID NO: 44) |
| | AQYMH (SEQ ID NO: 488) | WASTRES (SEQ ID NO: 45) |
| | WMNPNTVYTGSAQKFQG (SEQ ID NO: 489) | QQYYTTPFT (SEQ ID NO: 491) |
| | DWVGDGYNSFDY (SEQ ID NO: 490) | |
| TMPRSS4 | EVQLLESGGGLVQPGGSLRLSCAASGFTFSS | DIQMTQSPSSLSASVGDRVTITCRASQDIKNF |
| Ab78 | YGMNWVRQAPGKGLEWVSAISGSGGRTYYAD | LAWYQQKPGKAPKLLIYAASSLQSGVPSRFSG |
| | SVKGRFTISRDNAKNSLYLQMNSLRAEDTAV | SGSGTDFTLTISSLQPEDFATYYCQQSYSTPW |
| | YYCAKGTYYSSPKYSFDYWGQGTLVTVSS | TFGQGTKLEIK (SEQ ID NO: 493) |
| | (SEQ ID NO: 492) | RASQDIKNFLA (SEQ ID NO: 497) |
| | SYGMN (SEQ ID NO: 494) | AASSLQS (SEQ ID NO: 15) |
| | AISGSGGRTYYADSVKG (SEQ ID NO: 495) | QQSYSTPWT (SEQ ID NO: 498) |
| | GTYYSSPKYSEDY (SEQ ID NO: 496) | |
| TMPRSS4 | EVQLLESGGGLVQPGGSLRLSCAASGLTFSS | DIQMTQSPSSLSASVGDRVTITCRASQGISNY |
| Ab79 | YQMSSVSQAPGKGLEWVSYISSAANTVYYAD | LAWYQQKPGKAPKLLIYAASSLQSGVPSRFSG |
| | SVKGRFTISRDNSKNTLYLQMNSLRAEDTAV | SGSGTDFTLTISSLQPEDFATYYCQQSYSTPL |
| | YYCAREDESRSPYCSGGSCYRAEYFQHWGQG | TFGPGTKVDIK (SEQ ID NO: 500) |
| | TLVTVSS (SEQ ID NO: 499) | RASQGISNYLA (SEQ ID NO: 324) |
| | SYQMS (SEQ ID NO: 501) | AASSLQS (SEQ ID NO: 15) |
| | YISSAANTVYYADSVKG (SEQ ID NO: 502) | QQSYSTPLT (SEQ ID NO: 252) |
| | EDESRSPYCSGGSCYRAEYFQH (SEQ ID | |
| | NO: 503) | |

[0399] In some embodiments, the antibody or antigen-binding fragment that binds to human TMPRSS4 comprises a heavy chain variable domain (VH) comprising a heavy chain complementarity determining region 1 (HCDR1), a heavy chain complementarity determining region 2 (HCDR2), and a heavy chain complementarity determining region 3 (HCDR3), and a light chain variable domain (VL) comprising a light chain complementarity determining region 1 (LCDR1), a light chain complementarity determining region 2 (LCDR2), and a light chain complementarity determining region (LCDR3), wherein the HCDR1, HCDR2, HCDR3, LCDR1, LCDR2, and LCDR3 are each from a clone listed in Table 3. In some embodiments, the combination of six CDRs (a CDR-H1, a CDR-H2, a CDR-H3, a CDR-L1, a CDR-L2 and a CDR-L3) is according to Kabat, Chothia, AbM, IMGT, or Contact numbering.

[0400] In some embodiments, the antibody or antigen-binding fragment that binds to human TMPRSS4 comprises a VH and a VL each comprising an amino acid sequence at least 80%, at least 85%, at least 90%, at least 91%, at least 92%, at least 93%, at least 94%, at least 95%, at least 96%, at least 97%, at least 98%, at least 99%, at least 99.5% or 100% identical to the amino acid sequence of a VH and a VL of a clone listed in Table 3, optionally wherein the VH CDRs and the VL CDRs are identical to those of the respective sequences in Table 3.

[0401] In some embodiments, the antibody or antigen-binding fragment that binds to human TMPRSS4 comprises a VH comprising an amino acid sequence at least 80%, at least 85%, at least 90%, at least 91%, at least 92%, at least 93%, at least 94%, at least 95%, at least 96%, at least 97%, at least 98%, at least 99%, at least 99.5% or 100% identical to an amino acid sequence as set forth in SEQ ID NOs: 1, 9, 17, 24, 32, 40, 47, 55, 63, 71, 77, 84, 91, 99, 107, 113, 120, 128, 134, 140, 147, 153, 159, 166, 171, 178, 185, 191, 199, 205, 211, 218, 225, 233, 241, 246, 253, 259, 266, 274, 281, 286, 294, 299, 305, 312, 315, 319, 326, 332, 337, 340, 347, 353, 356, 360, 366, 370, 376, 382, 388, 392, 398, 404, 409, 414, 420, 424, 430, 437, 554, 452, 458, 465, 472, 480, 486, 492, or 499, optionally wherein the VH CDRs and the VL CDRs are identical to those in the respective sequence. In some embodiments, the antibody or antigen-binding fragment that binds to TMPRSS4 comprises a VL comprising an amino acid sequence at least 80%, at least 85%, at least 90%, at least 91%, at least 92%, at least 93%, at least 94%, at least 95%, at least 96%, at least 97%, at least 98%, at least 99%, at least 99.5% or 100% identical to an amino acid sequence as set forth in SEQ ID NOs: 2, 10, 18, 25, 33, 41, 48, 56, 64, 72, 78, 85, 92, 100, 108, 114, 121, 129, 135, 141, 148, 154, 160, 167, 172, 179, 186, 192, 200, 206, 212, 219, 226, 234, 242, 247, 254, 260, 267, 275, 282, 287, 295, 300, 306, 313, 316, 320, 327, 333, 316, 341, 348, 254, 357, 361, 367, 371, 377, 383, 389, 393, 399, 405, 410, 415, 421, 425, 431, 438, 446, 435, 459, 466, 473, 481, 487, 493, or 500, optionally wherein the VH CDRs and the VL CDRs are identical to those in the respective sequence. In some embodiments, the antibody or antigen-binding fragment that binds to TMPRSS4 comprises a VH comprising an amino acid sequence at least 80%, at least 85%, at least 90%, at least 91%, at least 92%, at least 93%, at least 94%, at least 95%, at least 96%, at least 97%, at least 98%, at least 99%, at least 99.5% or 100% identical to an amino acid sequence as set forth in SEQ ID NOs: 1, 9, 17, 24, 32, 40, 47, 55, 63, 71, 77, 84, 91, 99, 107, 113, 120, 128, 134, 140, 147, 153, 159, 166, 171, 178, 185, 191, 199, 205, 211, 218, 225, 233, 241, 246, 253, 259, 266, 274, 281, 286, 294, 299, 305, 312, 315, 319, 326, 332, 337, 340, 347, 353, 356, 360, 366, 370, 376, 382, 388, 392, 398, 404, 409, 414, 420, 424, 430, 437, 554, 452, 458, 465, 472, 480, 486, 492, or 499, optionally wherein the VH CDRs and the VL CDRs are identical to those in the respective sequence, and a VL comprising an amino acid sequence at least 80%, at least 85%, at least 90%, at least 91%, at least 92%, at least 93%, at least 94%, at least 95%, at least 96%, at least 97%, at least 98%, at least 99%, at least 99.5% or 100% identical to an amino acid sequence as set forth in SEQ ID NO: 2, 10, 18, 25, 33, 41, 48, 56, 64, 72, 78, 85, 92, 100, 108, 114, 121, 129, 135, 141, 148, 154, 160, 167, 172, 179, 186, 192, 200, 206, 212, 219, 226, 234, 242, 247, 254, 260, 267, 275, 282, 287, 295, 300, 306, 313, 316, 320, 327, 333, 316, 341, 348, 254, 357, 361, 367, 371, 377, 383, 389, 393, 399, 405, 410, 415, 421, 425, 431, 438, 446, 435, 459, 466, 473, 481, 487, 493, or 500, optionally wherein the VH CDRs and the VL CDRs are identical to those in the respective sequence.

[0402] In some embodiments, the antibody or antigen-binding fragment that binds to human TMPRSS4 is or is derived from TMPRSS4 Ab1. In some embodiments, the antibody or antigen-binding fragment that binds to TMPRSS4 comprises a VH comprising an HCDR1 comprising the amino acid sequence set forth in SEQ ID NO: 3, an HCDR2 comprising the amino acid sequence set forth in SEQ ID NO: 4, and an HCDR3 comprising the amino acid sequence set forth in SEQ ID NO: 5, and a VL comprising an LCDR1 comprising the amino acid sequence set forth in SEQ ID NO: 6, an LCDR2 comprising the amino acid sequence set forth in SEQ ID NO: 7, and an LCDR3 comprising the amino acid sequence set forth in SEQ ID NO: 8.

[0403] In some embodiments, the antibody or antigen-binding fragment that binds to human TMPRSS4 comprises a VH comprising an amino acid sequence at least 80%, at least 85%, at least 90%, at least 91%, at least 92%, at least 93%, at least 94%, at least 95%, at least 96%, at least 97%, at least 98%, at least 99%, at least 99.5% or 100% identical to the amino acid sequence set forth in SEQ ID NO: 1 and a VL comprising an amino acid sequence at least 80%, at least 85%, at least 90%, at least 91%, at least 92%, at least 93%, at least 94%, at least 95%, at least 96%, at least 97%, at least 98%, at least 99%, at least 99.5% or 100% identical to the amino acid sequence set forth in SEQ ID NO: 2. In some embodiments, to TMPRSS4 comprises a VH comprising the amino acid sequence set forth in SEQ ID NO: 1 and a VL comprising the amino acid sequence set forth in SEQ ID NO: 2.

[0404] In some embodiments, the antibody or antigen-binding fragment that binds to human TMPRSS4 is or is derived from TMPRSS4 Ab2. In some embodiments, the antibody or antigen-binding fragment that binds to TMPRSS4 comprises a VH comprising an HCDR1 comprising the amino acid sequence set forth in SEQ ID NO: 11, an HCDR2 comprising the amino acid sequence set forth in SEQ ID NO: 12, and an HCDR3 comprising the amino acid sequence set forth in SEQ ID NO: 13, and a VL comprising an LCDR1 comprising the amino acid sequence set forth in SEQ ID NO: 14, an LCDR2 comprising the amino acid sequence set forth in SEQ ID NO: 15, and an LCDR3 comprising the amino acid sequence set forth in SEQ ID NO: 16 and/or, the antibody or antigen-binding fragment that binds to TMPRSS4 comprises a VH comprising an amino acid sequence at least 80%, at least 85%, at least 90%, at least 91%, at least 92%, at least 93%, at least 94%, at least 95%, at least 96%, at least 97%, at least 98%, at least 99%, at least 99.5% or 100% identical to the amino acid sequence set forth in SEQ ID NO: 9 and a VL comprising an amino acid sequence at least 80%, at least 85%, at least 90%, at least 91%, at least 92%, at least 93%, at least 94%, at least 95%, at least 96%, at least 97%, at least 98%, at least 99%, at least 99.5% or 100% identical to the amino acid sequence set forth in SEQ ID NO: 10. In some embodiments, to TMPRSS4 comprises a VH comprising the amino acid sequence set forth in SEQ ID NO: 9 and a VL comprising the amino acid sequence set forth in SEQ ID NO: 10.

[0405] In some embodiments, the antibody or antigen-binding fragment that binds to human TMPRSS4 is or is derived from TMPRSS4 Ab3. In some embodiments, the antibody or antigen-binding fragment that binds to TMPRSS4 comprises a VH comprising an HCDR1 comprising the amino acid sequence set forth in SEQ ID NO: 19, an HCDR2 comprising the amino acid sequence set forth in SEQ ID NO: 20, and an HCDR3 comprising the amino acid sequence set forth in SEQ ID NO: 21, and a VL comprising an LCDR1 comprising the amino acid sequence set forth in SEQ ID NO: 22, an LCDR2 comprising the amino acid sequence set forth in SEQ ID NO: 15, and an LCDR3 comprising the amino acid sequence set forth in SEQ ID NO: 23 and/or the antibody or antigen-binding fragment that binds to TMPRSS4 comprises a VH comprising an amino acid sequence at least 80%, at least 85%, at least 90%, at least 91%, at least 92%, at least 93%, at least 94%, at least 95%, at least 96%, at least 97%, at least 98%, at least 99%, at least 99.5% or 100% identical to the amino acid sequence set forth in SEQ ID NO: 17 and a VL comprising an amino acid sequence at least 80%, at least 85%, at least 90%, at least 91%, at least 92%, at least 93%, at least 94%, at least 95%, at least 96%, at least 97%, at least 98%, at least 99%, at least 99.5% or 100% identical to the amino acid sequence set forth in SEQ ID NO: 18. In some embodiments, to TMPRSS4 comprises a VH comprising the amino acid sequence set forth in SEQ ID NO: 17 and a VL comprising the amino acid sequence set forth in SEQ ID NO: 18.

[0406] In some embodiments, the antibody or antigen-binding fragment that binds to human TMPRSS4 is or is derived from TMPRSS4 Ab4. In some embodiments, the antibody or antigen-binding fragment that binds to TMPRSS4 comprises a VH comprising an HCDR1 comprising the amino acid sequence set forth in SEQ ID NO: 26, an HCDR2 comprising the amino acid sequence set forth in SEQ ID NO: 27, and an HCDR3 comprising the amino acid sequence set forth in SEQ ID NO: 28, and a VL comprising an LCDR1 comprising the amino acid sequence set forth in SEQ ID NO: 29, an LCDR2 comprising the amino acid sequence set forth in SEQ ID NO: 30, and an LCDR3 comprising the amino acid sequence set forth in SEQ ID NO: 31 and/or the antibody or antigen-binding fragment that binds to TMPRSS4 comprises a VH comprising an amino acid sequence at least 80%, at least 85%, at least 90%, at least 91%, at least 92%, at least 93%, at least 94%, at least 95%, at least 96%, at least 97%, at least 98%, at least 99%, at least 99.5% or 100% identical to the amino acid sequence set forth in SEQ ID NO: 24 and a VL comprising an amino acid sequence at least 80%, at least 85%, at least 90%, at least 91%, at least 92%, at least 93%, at least 94%, at least 95%, at least 96%, at least 97%, at least 98%, at least 99%, at least 99.5% or 100% identical to the amino acid sequence set forth in SEQ ID NO: 25. In some embodiments, to TMPRSS4 comprises a VH comprising the amino acid sequence set forth in SEQ ID NO: 24 and a VL comprising the amino acid sequence set forth in SEQ ID NO: 25.

[0407] In some embodiments, the antibody or antigen-binding fragment that binds to human TMPRSS4 is or is derived from TMPRSS4 Ab5. In some embodiments, the antibody or antigen-binding fragment that binds to TMPRSS4 comprises a VH comprising an HCDR1 comprising the amino acid sequence set forth in SEQ ID NO: 34, an HCDR2 comprising the amino acid sequence set forth in SEQ ID NO: 35, and an HCDR3 comprising the amino acid sequence set forth in SEQ ID NO: 36, and a VL comprising an LCDR1 comprising the amino acid sequence set forth in SEQ ID NO: 37, an LCDR2 comprising the amino acid sequence set forth in SEQ ID NO: 38, and an LCDR3 comprising the amino acid sequence set forth in SEQ ID NO: 39 and/or the antibody or antigen-binding fragment that binds to TMPRSS4 comprises a VH comprising an amino acid sequence at least 80%, at least 85%, at least 90%, at least 91%, at least 92%, at least 93%, at least 94%, at least 95%, at least 96%, at least 97%, at least 98%, at least 99%, at least 99.5% or 100% identical to the amino acid sequence set forth in SEQ ID NO: 32 and a VL comprising an amino acid sequence at least 80%, at least 85%, at least 90%, at least 91%, at least 92%, at least 93%, at least 94%, at least 95%, at least 96%, at least 97%, at least 98%, at least 99%, at least 99.5% or 100% identical to the amino acid sequence set forth in SEQ ID NO: 33. In some embodiments, to TMPRSS4 comprises a VH comprising the amino acid sequence set forth in SEQ ID NO: 32 and a VL comprising the amino acid sequence set forth in SEQ ID NO: 33.

[0408] In some embodiments, the antibody or antigen-binding fragment that binds to human TMPRSS4 is or is derived from TMPRSS4 Ab6. In some embodiments, the antibody or antigen-binding fragment that binds to TMPRSS4 comprises a VH comprising an HCDR1 comprising the amino acid sequence set forth in SEQ ID NO: 34, an HCDR2 comprising the amino acid sequence set forth in SEQ ID NO: 42, and an HCDR3 comprising the amino acid sequence set forth in SEQ ID NO: 43, and a VL comprising an LCDR1 comprising the amino acid sequence set forth in SEQ ID NO: 44, an LCDR2 comprising the amino acid sequence set forth in SEQ ID NO: 45, and an LCDR3 comprising the amino acid sequence set forth in SEQ ID NO: 46 and/or the antibody or antigen-binding fragment that binds to TMPRSS4 comprises a VH comprising an amino acid sequence at least 80%, at least 85%, at least 90%, at least 91%, at least 92%, at least 93%, at least 94%, at least 95%, at least 96%, at least 97%, at least 98%, at least 99%, at least 99.5% or 100% identical to the amino acid sequence set forth in SEQ ID NO: 40 and a VL comprising an amino acid sequence at least 80%, at least 85%, at least 90%, at least 91%, at least 92%, at least 93%, at least 94%, at least 95%, at least 96%, at least 97%, at least 98%, at least 99%, at least 99.5% or 100% identical to the amino acid sequence set forth in SEQ ID NO: 41. In some embodiments, to TMPRSS4 comprises a VH comprising the amino acid sequence set forth in SEQ ID NO: 40 and a VL comprising the amino acid sequence set forth in SEQ ID NO: 41.

[0409] In some embodiments, the antibody or antigen-binding fragment that binds to human TMPRSS4 is or is derived from TMPRSS4 Ab7. In some embodiments, the antibody or antigen-binding fragment that binds to TMPRSS4 comprises a VH comprising an HCDR1 comprising the amino acid sequence set forth in SEQ ID NO: 49, an HCDR2 comprising the amino acid sequence set forth in SEQ ID NO: 50, and an HCDR3 comprising the amino acid sequence set forth in SEQ ID NO: 51, and a VL comprising an LCDR1 comprising the amino acid sequence set forth in SEQ ID NO: 52, an LCDR2 comprising the amino acid sequence set forth in SEQ ID NO: 53, and an LCDR3 comprising the amino acid sequence set forth in SEQ ID NO: 54 and/or the antibody or antigen-binding fragment that binds to TMPRSS4 comprises a VH comprising an amino acid sequence at least 80%, at least 85%, at least 90%, at least 91%, at least 92%, at least 93%, at least 94%, at least 95%, at least 96%, at least 97%, at least 98%, at least 99%, at least 99.5% or 100% identical to the amino acid sequence set forth in SEQ ID NO: 47 and a VL comprising an amino acid sequence at least 80%, at least 85%, at least 90%, at least 91%, at least 92%, at least 93%, at least 94%, at least 95%, at least 96%, at least 97%, at least 98%, at least 99%, at least 99.5% or 100% identical to the amino acid sequence set forth in SEQ ID NO: 48. In some embodiments, to TMPRSS4 comprises a VH comprising the amino acid sequence set forth in SEQ ID NO: 47 and a VL comprising the amino acid sequence set forth in SEQ ID NO: 48.

[0410] In some embodiments, the antibody or antigen-binding fragment that binds to human TMPRSS4 is or is derived from TMPRSS4 Ab8. In some embodiments, the antibody or antigen-binding fragment that binds to TMPRSS4 comprises a VH comprising an HCDR1 comprising the amino acid sequence set forth in SEQ ID NO: 57, an HCDR2 comprising the amino acid sequence set forth in SEQ ID NO: 58, and an HCDR3 comprising the amino acid sequence set forth in SEQ ID NO: 59, and a VL comprising an LCDR1 comprising the amino acid sequence set forth in SEQ ID NO: 60, an LCDR2 comprising the amino acid sequence set forth in SEQ ID NO: 61, and an LCDR3 comprising the amino acid sequence set forth in SEQ ID NO: 62 and/or the antibody or antigen-binding fragment that binds to TMPRSS4 comprises a VH comprising an amino acid sequence at least 80%, at least 85%, at least 90%, at least 91%, at least 92%, at least 93%, at least 94%, at least 95%, at least 96%, at least 97%, at least 98%, at least 99%, at least 99.5% or 100% identical to the amino acid sequence set forth in SEQ ID NO: 55 and a VL comprising an amino acid sequence at least 80%, at least 85%, at least 90%, at least 91%, at least 92%, at least 93%, at least 94%, at least 95%, at least 96%, at least 97%, at least 98%, at least 99%, at least 99.5% or 100% identical to the amino acid sequence set forth in SEQ ID NO: 56. In some embodiments, to TMPRSS4 comprises a VH comprising the amino acid sequence set forth in SEQ ID NO: 55 and a VL comprising the amino acid sequence set forth in SEQ ID NO: 56.

[0411] In some embodiments, the antibody or antigen-binding fragment that binds to human TMPRSS4 is or is derived from TMPRSS4 Ab9. In some embodiments, the antibody or antigen-binding fragment that binds to TMPRSS4 comprises a VH comprising an HCDR1 comprising the amino acid sequence set forth in SEQ ID NO: 65, an HCDR2 comprising the amino acid sequence set forth in SEQ ID NO: 66 and an HCDR3 comprising the amino acid sequence set forth in SEQ ID NO: 67, and a VL comprising an LCDR1 comprising the amino acid sequence set forth in SEQ ID NO: 68, an LCDR2 comprising the amino acid sequence set forth in SEQ ID NO: 69, and an LCDR3 comprising the amino acid sequence set forth in SEQ ID NO: 70 and/or the antibody or antigen-binding fragment that binds to TMPRSS4 comprises a VH comprising an amino acid sequence at least 80%, at least 85%, at least 90%, at least 91%, at least 92%, at least 93%, at least 94%, at least 95%, at least 96%, at least 97%, at least 98%, at least 99%, at least 99.5% or 100% identical to the amino acid sequence set forth in SEQ ID NO: 63 and a VL comprising an amino acid sequence at least 80%, at least 85%, at least 90%, at least 91%, at least 92%, at least 93%, at least 94%, at least 95%, at least 96%, at least 97%, at least 98%, at least 99%, at least 99.5% or 100% identical to the amino acid sequence set forth in SEQ ID NO: 64. In some embodiments, to TMPRSS4 comprises a VH comprising the amino acid sequence set forth in SEQ ID NO: 63 and a VL comprising the amino acid sequence set forth in SEQ ID NO: 64.

[0412] In some embodiments, the antibody or antigen-binding fragment that binds to human TMPRSS4 is or is derived from TMPRSS4 Ab10. In some embodiments, the antibody or antigen-binding fragment that binds to TMPRSS4 comprises a VH comprising an HCDR1 comprising the amino acid sequence set forth in SEQ ID NO: 34, an HCDR2 comprising the amino acid sequence set forth in SEQ ID NO: 73, and an HCDR3 comprising the amino acid sequence set forth in SEQ ID NO: 74, and a VL comprising an LCDR1 comprising the amino acid sequence set forth in SEQ ID NO: 75, an LCDR2 comprising the amino acid sequence set forth in SEQ ID NO: 38, and an LCDR3 comprising the amino acid sequence set forth in SEQ ID NO: 76 and/or the antibody or antigen-binding fragment that binds to TMPRSS4 comprises a VH comprising an amino acid sequence at least 80%, at least 85%, at least 90%, at least 91%, at least 92%, at least 93%, at least 94%, at least 95%, at least 96%, at least 97%, at least 98%, at least 99%, at least 99.5% or 100% identical to the amino acid sequence set forth in SEQ ID NO: 71 and a VL comprising an amino acid sequence at least 80%, at least 85%, at least 90%, at least 91%, at least 92%, at least 93%, at least 94%, at least 95%, at least 96%, at least 97%, at least 98%, at least 99%, at least 99.5% or 100% identical to the amino acid sequence set forth in SEQ ID NO: 72. In some embodiments, to TMPRSS4 comprises a VH comprising the amino acid sequence set forth in SEQ ID NO: 71 and a VL comprising the amino acid sequence set forth in SEQ ID NO: 72.

[0413] In some embodiments, the antibody or antigen-binding fragment that binds to human TMPRSS4 is or is derived from TMPRSS4 Ab11. In some embodiments, the antibody or antigen-binding fragment that binds to TMPRSS4 comprises a VH comprising an HCDR1 comprising the amino acid sequence set forth in SEQ ID NO: 79, an HCDR2 comprising the amino acid sequence set forth in SEQ ID NO: 80, and an HCDR3 comprising the amino acid sequence set forth in SEQ ID NO: 81, and a VL comprising an LCDR1 comprising the amino acid sequence set forth in SEQ ID NO: 82, an LCDR2 comprising the amino acid sequence set forth in SEQ ID NO: 15, and an LCDR3 comprising the amino acid sequence set forth in SEQ ID NO: 83 and/or the antibody or antigen-binding fragment that binds to TMPRSS4 comprises a VH comprising an amino acid sequence at least 80%, at least 85%, at least 90%, at least 91%, at least 92%, at least 93%, at least 94%, at least 95%, at least 96%, at least 97%, at least 98%, at least 99%, at least 99.5% or 100% identical to the amino acid sequence set forth in SEQ ID NO: 77 and a VL comprising an amino acid sequence at least 80%, at least 85%, at least 90%, at least 91%, at least 92%, at least 93%, at least 94%, at least 95%, at least 96%, at least 97%, at least 98%, at least 99%, at least 99.5% or 100% identical to the amino acid sequence set forth in SEQ ID NO: 78. In some embodiments, to TMPRSS4 comprises a VH comprising the amino acid sequence set forth in SEQ ID NO: 77 and a VL comprising the amino acid sequence set forth in SEQ ID NO: 78.

[0414] In some embodiments, the antibody or antigen-binding fragment that binds to human TMPRSS4 is or is derived from TMPRSS4 Ab12. In some embodiments, the antibody or antigen-binding fragment that binds to TMPRSS4 comprises a VH comprising an HCDR1 comprising the amino acid sequence set forth in SEQ ID NO: 86, an HCDR2 comprising the amino acid sequence set forth in SEQ ID NO: 87, and an HCDR3 comprising the amino acid sequence set forth in SEQ ID NO: 88, and a VL comprising an LCDR1 comprising the amino acid sequence set forth in SEQ ID NO: 89, an LCDR2 comprising the amino acid sequence set forth in SEQ ID NO: 90, and an LCDR3 comprising the amino acid sequence set forth in SEQ ID NO: 70 and/or the antibody or antigen-binding fragment that binds to TMPRSS4 comprises a VH comprising an amino acid sequence at least 80%, at least 85%, at least 90%, at least 91%, at least 92%, at least 93%, at least 94%, at least 95%, at least 96%, at least 97%, at least 98%, at least 99%, at least 99.5% or 100% identical to the amino acid sequence set forth in SEQ ID NO: 84 and a VL comprising an amino acid sequence at least 80%, at least 85%, at least 90%, at least 91%, at least 92%, at least 93%, at least 94%, at least 95%, at least 96%, at least 97%, at least 98%, at least 99%, at least 99.5% or 100% identical to the amino acid sequence set forth in SEQ ID NO: 85. In some embodiments, to TMPRSS4 comprises a VH comprising the amino acid sequence set forth in SEQ ID NO: 84 and a VL comprising the amino acid sequence set forth in SEQ ID NO: 85.

[0415] In some embodiments, the antibody or antigen-binding fragment that binds to human TMPRSS4 is or is derived from TMPRSS4 Ab13. In some embodiments, the antibody or antigen-binding fragment that binds to TMPRSS4 comprises a VH comprising an HCDR1 comprising the amino acid sequence set forth in SEQ ID NO: 93, an HCDR2 comprising the amino acid sequence set forth in SEQ ID NO: 94, and an HCDR3 comprising the amino acid sequence set forth in SEQ ID NO: 95, and a VL comprising an LCDR1 comprising the amino acid sequence set forth in SEQ ID NO: 96, an LCDR2 comprising the amino acid sequence set forth in SEQ ID NO: 97, and an LCDR3 comprising the amino acid sequence set forth in SEQ ID NO: 98 and/or the antibody or antigen-binding fragment that binds to TMPRSS4 comprises a VH comprising an amino acid sequence at least 80%, at least 85%, at least 90%, at least 91%, at least 92%, at least 93%, at least 94%, at least 95%, at least 96%, at least 97%, at least 98%, at least 99%, at least 99.5% or 100% identical to the amino acid sequence set forth in SEQ ID NO: 91 and a VL comprising an amino acid sequence at least 80%, at least 85%, at least 90%, at least 91%, at least 92%, at least 93%, at least 94%, at least 95%, at least 96%, at least 97%, at least 98%, at least 99%, at least 99.5% or 100% identical to the amino acid sequence set forth in SEQ ID NO: 92. In some embodiments, to TMPRSS4 comprises a VH comprising the amino acid sequence set forth in SEQ ID NO: 91 and a VL comprising the amino acid sequence set forth in SEQ ID NO: 92.

[0416] In some embodiments, the antibody or antigen-binding fragment that binds to human TMPRSS4 is or is derived from TMPRSS4 Ab14. In some embodiments, the antibody or antigen-binding fragment that binds to TMPRSS4 comprises a VH comprising an HCDR1 comprising the amino acid sequence set forth in SEQ ID NO: 101, an HCDR2 comprising the amino acid sequence set forth in SEQ ID NO: 102, and an HCDR3 comprising the amino acid sequence set forth in SEQ ID NO: 103, and a VL comprising an LCDR1 comprising the amino acid sequence set forth in SEQ ID NO: 104, an LCDR2 comprising the amino acid sequence set forth in SEQ ID NO: 105, and an LCDR3 comprising the amino acid sequence set forth in SEQ ID NO: 106 and/or the antibody or antigen-binding fragment that binds to TMPRSS4 comprises a VH comprising an amino acid sequence at least 80%, at least 85%, at least 90%, at least 91%, at least 92%, at least 93%, at least 94%, at least 95%, at least 96%, at least 97%, at least 98%, at least 99%, at least 99.5% or 100% identical to the amino acid sequence set forth in SEQ ID NO: 99 and a VL comprising an amino acid sequence at least 80%, at least 85%, at least 90%, at least 91%, at least 92%, at least 93%, at least 94%, at least 95%, at least 96%, at least 97%, at least 98%, at least 99%, at least 99.5% or 100% identical to the amino acid sequence set forth in SEQ ID NO: 100. In some embodiments, to TMPRSS4 comprises a VH comprising the amino acid sequence set forth in SEQ ID NO: 99 and a VL comprising the amino acid sequence set forth in SEQ ID NO: 100.

[0417] In some embodiments, the antibody or antigen-binding fragment that binds to human TMPRSS4 is or is derived from TMPRSS4 Ab15. In some embodiments, the antibody or antigen-binding fragment that binds to TMPRSS4 comprises a VH comprising an HCDR1 comprising the amino acid sequence set forth in SEQ ID NO: 65, an HCDR2 comprising the amino acid sequence set forth in SEQ ID NO: 109, and an HCDR3 comprising the amino acid sequence set forth in SEQ ID NO: 110, and a VL comprising an LCDR1 comprising the amino acid sequence set forth in SEQ ID NO: 111, an LCDR2 comprising the amino acid sequence set forth in SEQ ID NO: 15, and an LCDR3 comprising the amino acid sequence set forth in SEQ ID NO: 112 and/or the antibody or antigen-binding fragment that binds to TMPRSS4 comprises a VH comprising an amino acid sequence at least 80%, at least 85%, at least 90%, at least 91%, at least 92%, at least 93%, at least 94%, at least 95%, at least 96%, at least 97%, at least 98%, at least 99%, at least 99.5% or 100% identical to the amino acid sequence set forth in SEQ ID NO: 107 and a VL comprising an amino acid sequence at least 80%, at least 85%, at least 90%, at least 91%, at least 92%, at least 93%, at least 94%, at least 95%, at least 96%, at least 97%, at least 98%, at least 99%, at least 99.5% or 100% identical to the amino acid sequence set forth in SEQ ID NO: 108. In some embodiments, to TMPRSS4 comprises a VH comprising the amino acid sequence set forth in SEQ ID NO: 107 and a VL comprising the amino acid sequence set forth in SEQ ID NO: 108.

[0418] In some embodiments, the antibody or antigen-binding fragment that binds to human TMPRSS4 is or is derived from TMPRSS4 Ab16. In some embodiments, the antibody or antigen-binding fragment that binds to TMPRSS4 comprises a VH comprising an HCDR1 comprising the amino acid sequence set forth in SEQ ID NO: 115, an HCDR2 comprising the amino acid sequence set forth in SEQ ID NO: 80, and an HCDR3 comprising the amino acid sequence set forth in SEQ ID NO: 116, and a VL comprising an LCDR1 comprising the amino acid sequence set forth in SEQ ID NO: 117, an LCDR2 comprising the amino acid sequence set forth in SEQ ID NO: 118, and an LCDR3 comprising the amino acid sequence set forth in SEQ ID NO: 119 and/or the antibody or antigen-binding fragment that binds to TMPRSS4 comprises a VH comprising an amino acid sequence at least 80%, at least 85%, at least 90%, at least 91%, at least 92%, at least 93%, at least 94%, at least 95%, at least 96%, at least 97%, at least 98%, at least 99%, at least 99.5% or 100% identical to the amino acid sequence set forth in SEQ ID NO: 113 and a VL comprising an amino acid sequence at least 80%, at least 85%, at least 90%, at least 91%, at least 92%, at least 93%, at least 94%, at least 95%, at least 96%, at least 97%, at least 98%, at least 99%, at least 99.5% or 100% identical to the amino acid sequence set forth in SEQ ID NO: 114. In some embodiments, to TMPRSS4 comprises a VH comprising the amino acid sequence set forth in SEQ ID NO: 113 and a VL comprising the amino acid sequence set forth in SEQ ID NO: 114.

[0419] In some embodiments, the antibody or antigen-binding fragment that binds to human TMPRSS4 is or is derived from TMPRSS4 Ab17. In some embodiments, the antibody or antigen-binding fragment that binds to TMPRSS4 comprises a VH comprising an HCDR1 comprising the amino acid sequence set forth in SEQ ID NO: 122, an HCDR2 comprising the amino acid sequence set forth in SEQ ID NO: 123, and an HCDR3 comprising the amino acid sequence set forth in SEQ ID NO: 124, and a VL comprising an LCDR1 comprising the amino acid sequence set forth in SEQ ID NO: 125, an LCDR2 comprising the amino acid sequence set forth in SEQ ID NO: 126, and an LCDR3 comprising the amino acid sequence set forth in SEQ ID NO: 127 and/or the antibody or antigen-binding fragment that binds to TMPRSS4 comprises a VH comprising an amino acid sequence at least 80%, at least 85%, at least 90%, at least 91%, at least 92%, at least 93%, at least 94%, at least 95%, at least 96%, at least 97%, at least 98%, at least 99%, at least 99.5% or 100% identical to the amino acid sequence set forth in SEQ ID NO: 120 and a VL comprising an amino acid sequence at least 80%, at least 85%, at least 90%, at least 91%, at least 92%, at least 93%, at least 94%, at least 95%, at least 96%, at least 97%, at least 98%, at least 99%, at least 99.5% or 100% identical to the amino acid sequence set forth in SEQ ID NO: 121. In some embodiments, to TMPRSS4 comprises a VH comprising the amino acid sequence set forth in SEQ ID NO: 120 and a VL comprising the amino acid sequence set forth in SEQ ID NO: 121.

[0420] In some embodiments, the antibody or antigen-binding fragment that binds to human TMPRSS4 is or is derived from TMPRSS4 Ab18. In some embodiments, the antibody or antigen-binding fragment that binds to TMPRSS4 comprises a VH comprising an HCDR1 comprising the amino acid sequence set forth in SEQ ID NO: 130, an HCDR2 comprising the amino acid sequence set forth in SEQ ID NO: 131, and an HCDR3 comprising the amino acid sequence set forth in SEQ ID NO: 132, and a VL comprising an LCDR1 comprising the amino acid sequence set forth in SEQ ID NO: 44, an LCDR2 comprising the amino acid sequence set forth in SEQ ID NO: 45, and an LCDR3 comprising the amino acid sequence set forth in SEQ ID NO: 133 and/or the antibody or antigen-binding fragment that binds to TMPRSS4 comprises a VH comprising an amino acid sequence at least 80%, at least 85%, at least 90%, at least 91%, at least 92%, at least 93%, at least 94%, at least 95%, at least 96%, at least 97%, at least 98%, at least 99%, at least 99.5% or 100% identical to the amino acid sequence set forth in SEQ ID NO: 128 and a VL comprising an amino acid sequence at least 80%, at least 85%, at least 90%, at least 91%, at least 92%, at least 93%, at least 94%, at least 95%, at least 96%, at least 97%, at least 98%, at least 99%, at least 99.5% or 100% identical to the amino acid sequence set forth in SEQ ID NO: 129. In some embodiments, to TMPRSS4 comprises a VH comprising the amino acid sequence set forth in SEQ ID NO: 128 and a VL comprising the amino acid sequence set forth in SEQ ID NO: 129.

[0421] In some embodiments, the antibody or antigen-binding fragment that binds to human TMPRSS4 is or is derived from TMPRSS4 Ab19. In some embodiments, the antibody or antigen-binding fragment that binds to TMPRSS4 comprises a VH comprising an HCDR1 comprising the amino acid sequence set forth in SEQ ID NO: 136, an HCDR2 comprising the amino acid sequence set forth in SEQ ID NO: 137, and an HCDR3 comprising the amino acid sequence set forth in SEQ ID NO: 138, and a VL comprising an LCDR1 comprising the amino acid sequence set forth in SEQ ID NO: 139, an LCDR2 comprising the amino acid sequence set forth in SEQ ID NO: 118, and an LCDR3 comprising the amino acid sequence set forth in SEQ ID NO: 70 and/or the antibody or antigen-binding fragment that binds to TMPRSS4 comprises a VH comprising an amino acid sequence at least 80%, at least 85%, at least 90%, at least 91%, at least 92%, at least 93%, at least 94%, at least 95%, at least 96%, at least 97%, at least 98%, at least 99%, at least 99.5% or 100% identical to the amino acid sequence set forth in SEQ ID NO: 134 and a VL comprising an amino acid sequence at least 80%, at least 85%, at least 90%, at least 91%, at least 92%, at least 93%, at least 94%, at least 95%, at least 96%, at least 97%, at least 98%, at least 99%, at least 99.5% or 100% identical to the amino acid sequence set forth in SEQ ID NO: 135. In some embodiments, to TMPRSS4 comprises a VH comprising the amino acid sequence set forth in SEQ ID NO: 134 and a VL comprising the amino acid sequence set forth in SEQ ID NO: 135.

[0422] In some embodiments, the antibody or antigen-binding fragment that binds to human TMPRSS4 is or is derived from TMPRSS4 Ab20. In some embodiments, the antibody or antigen-binding fragment that binds to TMPRSS4 comprises a VH comprising an HCDR1 comprising the amino acid sequence set forth in SEQ ID NO: 65, an HCDR2 comprising the amino acid sequence set forth in SEQ ID NO: 142, and an HCDR3 comprising the amino acid sequence set forth in SEQ ID NO: 143, and a VL comprising an LCDR1 comprising the amino acid sequence set forth in SEQ ID NO: 144, an LCDR2 comprising the amino acid sequence set forth in SEQ ID NO: 145, and an LCDR3 comprising the amino acid sequence set forth in SEQ ID NO: 146 and/or the antibody or antigen-binding fragment that binds to TMPRSS4 comprises a VH comprising an amino acid sequence at least 80%, at least 85%, at least 90%, at least 91%, least 99%, at least 99.5% or 100% identical to the amino acid sequence set forth in SEQ ID NO: 140 and a VL comprising an amino acid sequence at least 80%, at least 85%, at least 90%, at least 91%, at least 92%, at least 93%, at least 94%, at least 95%, at least 96%, at least 97%, at least 98%, at least 99%, at least 99.5% or 100% identical to the amino acid sequence set forth in SEQ ID NO: 141. In some embodiments, to TMPRSS4 comprises a VH comprising the amino acid sequence set forth in SEQ ID NO: 140 and a VL comprising the amino acid sequence set forth in SEQ ID NO: 141.

[0423] In some embodiments, the antibody or antigen-binding fragment that binds to human TMPRSS4 is or is derived from TMPRSS4 Ab21. In some embodiments, the antibody or antigen-binding fragment that binds to TMPRSS4 comprises a VH comprising an HCDR1 comprising the amino acid sequence set forth in SEQ ID NO: 149, an HCDR2 comprising the amino acid sequence set forth in SEQ ID NO: 150, and an HCDR3 comprising the amino acid sequence set forth in SEQ ID NO: 151, and a VL comprising an LCDR1 comprising the amino acid sequence set forth in SEQ ID NO: 139, an LCDR2 comprising the amino acid sequence set forth in SEQ ID NO: 30, and an LCDR3 comprising the amino acid sequence set forth in SEQ ID NO: 152 and/or the antibody or antigen-binding fragment that binds to TMPRSS4 comprises a VH comprising an amino acid sequence at least 80%, at least 85%, at least 90%, at least 91%, at least 92%, at least 93%, at least 94%, at least 95%, at least 96%, at least 97%, at least 98%, at least 99%, at least 99.5% or 100% identical to the amino acid sequence set forth in SEQ ID NO: 147 and a VL comprising an amino acid sequence at least 80%, at least 85%, at least 90%, at least 91%, at least 92%, at least 93%, at least 94%, at least 95%, at least 96%, at least 97%, at least 98%, at least 99%, at least 99.5% or 100% identical to the amino acid sequence set forth in SEQ ID NO: 148. In some embodiments, to TMPRSS4 comprises a VH comprising the amino acid sequence set forth in SEQ ID NO: 147 and a VL comprising the amino acid sequence set forth in SEQ ID NO: 148.

[0424] In some embodiments, the antibody or antigen-binding fragment that binds to human TMPRSS4 is or is derived from TMPRSS4 Ab22. In some embodiments, the antibody or antigen-binding fragment that binds to TMPRSS4 comprises a VH comprising an HCDR1 comprising the amino acid sequence set forth in SEQ ID NO: 34, an HCDR2 comprising the amino acid sequence set forth in SEQ ID NO: 155, and an HCDR3 comprising the amino acid sequence set forth in SEQ ID NO: 156, and a VL comprising an LCDR1 comprising the amino acid sequence set forth in SEQ ID NO: 157, an LCDR2 comprising the amino acid sequence set forth in SEQ ID NO: 15, and an LCDR3 comprising the amino acid sequence set forth in SEQ ID NO: 158 and/or the antibody or antigen-binding fragment that binds to TMPRSS4 comprises a VH comprising an amino acid sequence at least 80%, at least 85%, at least 90%, at least 91%, at least 92%, at least 93%, at least 94%, at least 95%, at least 96%, at least 97%, at least 98%, at least 99%, at least 99.5% or 100% identical to the amino acid sequence set forth in SEQ ID NO: 153 and a VL comprising an amino acid sequence at least 80%, at least 85%, at least 90%, at least 91%, at least 92%, at least 93%, at least 94%, at least 95%, at least 96%, at least 97%, at least 98%, at least 99%, at least 99.5% or 100% identical to the amino acid sequence set forth in SEQ ID NO: 154. In some embodiments, to TMPRSS4 comprises a VH comprising the amino acid sequence set forth in SEQ ID NO: 153 and a VL comprising the amino acid sequence set forth in SEQ ID NO: 154.

[0425] In some embodiments, the antibody or antigen-binding fragment that binds to human TMPRSS4 is or is derived from TMPRSS4 Ab23. In some embodiments, the antibody or antigen-binding fragment that binds to TMPRSS4 comprises a VH comprising an HCDR1 comprising the amino acid sequence set forth in SEQ ID NO: 161, an HCDR2 comprising the amino acid sequence set forth in SEQ ID NO: 162, and an HCDR3 comprising the amino acid sequence set forth in SEQ ID NO: 163, and a VL comprising an LCDR1 comprising the amino acid sequence set forth in SEQ ID NO: 164, an LCDR2 comprising the amino acid sequence set forth in SEQ ID NO: 38, and an LCDR3 comprising the amino acid sequence set forth in SEQ ID NO: 165 and/or the antibody or antigen-binding fragment that binds to TMPRSS4 comprises a VH comprising an amino acid sequence at least 80%, at least 85%, at least 90%, at least 91%, at least 92%, at least 93%, at least 94%, at least 95%, at least 96%, at least 97%, at least 98%, at least 99%, at least 99.5% or 100% identical to the amino acid sequence set forth in SEQ ID NO: 159 and a VL comprising an amino acid sequence at least 80%, at least 85%, at least 90%, at least 91%, at least 92%, at least 93%, at least 94%, at least 95%, at least 96%, at least 97%, at least 98%, at least 99%, at least 99.5% or 100% identical to the amino acid sequence set forth in SEQ ID NO: 160. In some embodiments, to TMPRSS4 comprises a VH comprising the amino acid sequence set forth in SEQ ID NO: 159 and a VL comprising the amino acid sequence set forth in SEQ ID NO: 160.

[0426] In some embodiments, the antibody or antigen-binding fragment that binds to human TMPRSS4 is or is derived from TMPRSS4 Ab24. In some embodiments, the antibody or antigen-binding fragment that binds to TMPRSS4 comprises a VH comprising an HCDR1 comprising the amino acid sequence set forth in SEQ ID NO: 34, an HCDR2 comprising the amino acid sequence set forth in SEQ ID NO: 168, and an HCDR3 comprising the amino acid sequence set forth in SEQ ID NO: 169, and a VL comprising an LCDR1 comprising the amino acid sequence set forth in SEQ ID NO: 60, an LCDR2 comprising the amino acid sequence set forth in SEQ ID NO: 30, and an LCDR3 comprising the amino acid sequence set forth in SEQ ID NO: 170 and/or the antibody or antigen-binding fragment that binds to TMPRSS4 comprises a VH comprising an amino acid sequence at least 80%, at least 85%, at least 90%, at least 91%, at least 92%, at least 93%, at least 94%, at least 95%, at least 96%, at least 97%, at least 98%, at least 99%, at least 99.5% or 100% identical to the amino acid sequence set forth in SEQ ID NO: 166 and a VL comprising an amino acid sequence at least 80%, at least 85%, at least 90%, at least 91%, at least 92%, at least 93%, at least 94%, at least 95%, at least 96%, at least 97%, at least 98%, at least 99%, at least 99.5% or 100% identical to the amino acid sequence set forth in SEQ ID NO: 167. In some embodiments, to TMPRSS4 comprises a VH comprising the amino acid sequence set forth in SEQ ID NO: 166 and a VL comprising the amino acid sequence set forth in SEQ ID NO: 167.

[0427] In some embodiments, the antibody or antigen-binding fragment that binds to human TMPRSS4 is or is derived from TMPRSS4 Ab25. In some embodiments, the antibody or antigen-binding fragment that binds to TMPRSS4 comprises a VH comprising an HCDR1 comprising the amino acid sequence set forth in SEQ ID NO: 173, an HCDR2 comprising the amino acid sequence set forth in SEQ ID NO: 66, and an HCDR3 comprising the amino acid sequence set forth in SEQ ID NO: 174, and a VL comprising an LCDR1 comprising the amino acid sequence set forth in SEQ ID NO: 175, an LCDR2 comprising the amino acid sequence set forth in SEQ ID NO: 176, and an LCDR3 comprising the amino acid sequence set forth in SEQ ID NO: 177 and/or the antibody or antigen-binding fragment that binds to TMPRSS4 comprises a VH comprising an amino acid sequence at least 80%, at least 85%, at least 90%, at least 91%, at least 92%, at least 93%, at least 94%, at least 95%, at least 96%, at least 97%, at least 98%, at least 99%, at least 99.5% or 100% identical to the amino acid sequence set forth in SEQ ID NO: 171 and a VL comprising an amino acid sequence at least 80%, at least 85%, at least 90%, at least 98%, at least 99%, at least 99.5% or 100% identical to the amino acid sequence set forth in SEQ ID NO: 172. In some embodiments, to TMPRSS4 comprises a VH comprising the amino acid sequence set forth in SEQ ID NO: 171 and a VL comprising the amino acid sequence set forth in SEQ ID NO: 172.

[0428] In some embodiments, the antibody or antigen-binding fragment that binds to human TMPRSS4 is or is derived from TMPRSS4 Ab26. In some embodiments, the antibody or antigen-binding fragment that binds to TMPRSS4 comprises a VH comprising an HCDR1 comprising the amino acid sequence set forth in SEQ ID NO: 180, an HCDR2 comprising the amino acid sequence set forth in SEQ ID NO: 181, and an HCDR3 comprising the amino acid sequence set forth in SEQ ID NO: 182, and a VL comprising an LCDR1 comprising the amino acid sequence set forth in SEQ ID NO: 183, an LCDR2 comprising the amino acid sequence set forth in SEQ ID NO: 15, and an LCDR3 comprising the amino acid sequence set forth in SEQ ID NO: 184 and/or the antibody or antigen-binding fragment that binds to TMPRSS4 comprises a VH comprising an amino acid sequence at least 80%, at least 85%, at least 90%, at least 91%, at least 92%, at least 93%, at least 94%, at least 95%, at least 96%, at least 97%, at least 98%, at least 99%, at least 99.5% or 100% identical to the amino acid sequence set forth in SEQ ID NO: 178 and a VL comprising an amino acid sequence at least 80%, at least 85%, at least 90%, at least 91%, at least 92%, at least 93%, at least 94%, at least 95%, at least 96%, at least 97%, at least 98%, at least 99%, at least 99.5% or 100% identical to the amino acid sequence set forth in SEQ ID NO: 179. In some embodiments, to TMPRSS4 comprises a VH comprising the amino acid sequence set forth in SEQ ID NO: 178 and a VL comprising the amino acid sequence set forth in SEQ ID NO: 179.

[0429] In some embodiments, the antibody or antigen-binding fragment that binds to human TMPRSS4 is or is derived from TMPRSS4 Ab27. In some embodiments, the antibody or antigen-binding fragment that binds to TMPRSS4 comprises a VH comprising an HCDR1 comprising the amino acid sequence set forth in SEQ ID NO: 187, an HCDR2 comprising the amino acid sequence set forth in SEQ ID NO: 188, and an HCDR3 comprising the amino acid sequence set forth in SEQ ID NO: 189, and a VL comprising an LCDR1 comprising the amino acid sequence set forth in SEQ ID NO: 292, an LCDR2 comprising the amino acid sequence set forth in SEQ ID NO: 15, and an LCDR3 comprising the amino acid sequence set forth in SEQ ID NO: 190 and/or the antibody or antigen-binding fragment that binds to TMPRSS4 comprises a VH comprising an amino acid sequence at least 80%, at least 85%, at least 90%, at least 91%, at least 92%, at least 93%, at least 94%, at least 95%, at least 96%, at least 97%, at least 98%, at least 99%, at least 99.5% or 100% identical to the amino acid sequence set forth in SEQ ID NO: 185 and a VL comprising an amino acid sequence at least 80%, at least 85%, at least 90%, at least 91%, at least 92%, at least 93%, at least 94%, at least 95%, at least 96%, at least 97%, at least 98%, at least 99%, at least 99.5% or 100% identical to the amino acid sequence set forth in SEQ ID NO: 186. In some embodiments, to TMPRSS4 comprises a VH comprising the amino acid sequence set forth in SEQ ID NO: 185 and a VL comprising the amino acid sequence set forth in SEQ ID NO: 186.

[0430] In some embodiments, the antibody or antigen-binding fragment that binds to human TMPRSS4 is or is derived from TMPRSS4 Ab28. In some embodiments, the antibody or antigen-binding fragment that binds to TMPRSS4 comprises a VH comprising an HCDR1 comprising the amino acid sequence set forth in SEQ ID NO: 193, an HCDR2 comprising the amino acid sequence set forth in SEQ ID NO: 194, and an HCDR3 comprising the amino acid sequence set forth in SEQ ID NO: 195, and a VL comprising an LCDR1 comprising the amino acid sequence set forth in SEQ ID NO: 196, an LCDR2 comprising the amino acid sequence set forth in SEQ ID NO: 197, and an LCDR3 comprising the amino acid sequence set forth in SEQ ID NO: 198 and/or the antibody or antigen-binding fragment that binds to TMPRSS4 comprises a VH comprising an amino acid sequence at least 80%, at least 85%, at least 90%, at least 91%, at least 92%, at least 93%, at least 94%, at least 95%, at least 96%, at least 97%, at least 98%, at least 99%, at least 99.5% or 100% identical to the amino acid sequence set forth in SEQ ID NO: 191 and a VL comprising an amino acid sequence at least 80%, at least 85%, at least 90%, at least 91%, at least 92%, at least 93%, at least 94%, at least 95%, at least 96%, at least 97%, at least 98%, at least 99%, at least 99.5% or 100% identical to the amino acid sequence set forth in SEQ ID NO: 192. In some embodiments, to TMPRSS4 comprises a VH comprising the amino acid sequence set forth in SEQ ID NO: 191 and a VL comprising the amino acid sequence set forth in SEQ ID NO: 192.

[0431] In some embodiments, the antibody or antigen-binding fragment that binds to human TMPRSS4 is or is derived from TMPRSS4 Ab29. In some embodiments, the antibody or antigen-binding fragment that binds to TMPRSS4 comprises a VH comprising an HCDR1 comprising the amino acid sequence set forth in SEQ ID NO: 201, an HCDR2 comprising the amino acid sequence set forth in SEQ ID NO: 194, and an HCDR3 comprising the amino acid sequence set forth in SEQ ID NO: 202, and a VL comprising an LCDR1 comprising the amino acid sequence set forth in SEQ ID NO: 29, an LCDR2 comprising the amino acid sequence set forth in SEQ ID NO: 203, and an LCDR3 comprising the amino acid sequence set forth in SEQ ID NO: 204 and/or the antibody or antigen-binding fragment that binds to TMPRSS4 comprises a VH comprising an amino acid sequence at least 80%, at least 85%, at least 90%, at least 91%, at least 92%, at least 93%, at least 94%, at least 95%, at least 96%, at least 97%, at least 98%, at least 99%, at least 99.5% or 100% identical to the amino acid sequence set forth in SEQ ID NO: 199 and a VL comprising an amino acid sequence at least 80%, at least 85%, at least 90%, at least 91%, at least 92%, at least 93%, at least 94%, at least 95%, at least 96%, at least 97%, at least 98%, at least 99%, at least 99.5% or 100% identical to the amino acid sequence set forth in SEQ ID NO: 200. In some embodiments, to TMPRSS4 comprises a VH comprising the amino acid sequence set forth in SEQ ID NO: 199 and a VL comprising the amino acid sequence set forth in SEQ ID NO: 200.

[0432] In some embodiments, the antibody or antigen-binding fragment that binds to human TMPRSS4 is or is derived from TMPRSS4 Ab30. In some embodiments, the antibody or antigen-binding fragment that binds to TMPRSS4 comprises a VH comprising an HCDR1 comprising the amino acid sequence set forth in SEQ ID NO: 207, an HCDR2 comprising the amino acid sequence set forth in SEQ ID NO: 194, and an HCDR3 comprising the amino acid sequence set forth in SEQ ID NO: 208, and a VL comprising an LCDR1 comprising the amino acid sequence set forth in SEQ ID NO: 209, an LCDR2 comprising the amino acid sequence set forth in SEQ ID NO: 38, and an LCDR3 comprising the amino acid sequence set forth in SEQ ID NO: 210 and/or the antibody or antigen-binding fragment that binds to TMPRSS4 comprises a VH comprising an amino acid sequence at least 80%, at least 85%, at least 90%, at least 91%, at least 92%, at least 93%, at least 94%, at least 95%, at least 96%, at least 97%, at least 98%, at least 99%, at least 99.5% or 100% identical to the amino acid sequence set forth in SEQ ID NO: 205 and a VL comprising an amino acid sequence at least 80%, at least 85%, at least 90%, at least 91%, at least 92%, at least 93%, at least 94%, at least 95%, at least 96%, at least 97%, at least 98%, at least 99%, at least 99.5% or 100% identical to the amino acid sequence set forth in SEQ ID NO: 206. In some embodiments, to TMPRSS4 comprises a VH comprising the amino acid sequence set forth in SEQ ID NO: 205 and a VL comprising the amino acid sequence set forth in SEQ ID NO: 206.

[0433] In some embodiments, the antibody or antigen-binding fragment that binds to human TMPRSS4 is or is derived from TMPRSS4 Ab31. In some embodiments, the antibody or antigen-binding fragment that binds to TMPRSS4 comprises a VH comprising an HCDR1 comprising the amino acid sequence set forth in SEQ ID NO: 213, an HCDR2 comprising the amino acid sequence set forth in SEQ ID NO: 214, and an HCDR3 comprising the amino acid sequence set forth in SEQ ID NO: 215, and a VL comprising an LCDR1 comprising the amino acid sequence set forth in SEQ ID NO: 216, an LCDR2 comprising the amino acid sequence set forth in SEQ ID NO: 38, and an LCDR3 comprising the amino acid sequence set forth in SEQ ID NO: 217 and/or the antibody or antigen-binding fragment that binds to TMPRSS4 comprises a VH comprising an amino acid sequence at least 80%, at least 85%, at least 90%, at least 91%, at least 92%, at least 93%, at least 94%, at least 95%, at least 96%, at least 97%, at least 98%, at least 99%, at least 99.5% or 100% identical to the amino acid sequence set forth in SEQ ID NO: 211 and a VL comprising an amino acid sequence at least 80%, at least 85%, at least 90%, at least 91%, at least 92%, at least 93%, at least 94%, at least 95%, at least 96%, at least 97%, at least 98%, at least 99%, at least 99.5% or 100% identical to the amino acid sequence set forth in SEQ ID NO: 212. In some embodiments, to TMPRSS4 comprises a VH comprising the amino acid sequence set forth in SEQ ID NO: 211 and a VL comprising the amino acid sequence set forth in SEQ ID NO: 212.

[0434] In some embodiments, the antibody or antigen-binding fragment that binds to human TMPRSS4 is or is derived from TMPRSS4 Ab32. In some embodiments, the antibody or antigen-binding fragment that binds to TMPRSS4 comprises a VH comprising an HCDR1 comprising the amino acid sequence set forth in SEQ ID NO: 220, an HCDR2 comprising the amino acid sequence set forth in SEQ ID NO: 221, and an HCDR3 comprising the amino acid sequence set forth in SEQ ID NO: 81, and a VL comprising an LCDR1 comprising the amino acid sequence set forth in SEQ ID NO: 222, an LCDR2 comprising the amino acid sequence set forth in SEQ ID NO: 223, and an LCDR3 comprising the amino acid sequence set forth in SEQ ID NO: 224 and/or the antibody or antigen-binding fragment that binds to TMPRSS4 comprises a VH comprising an amino acid sequence at least 80%, at least 85%, at least 90%, at least 91%, least 99%, at least 99.5% or 100% identical to the amino acid sequence set forth in SEQ ID NO: 218 and a VL comprising an amino acid sequence at least 80%, at least 85%, at least 90%, at least 91%, at least 92%, at least 93%, at least 94%, at least 95%, at least 96%, at least 97%, at least 98%, at least 99%, at least 99.5% or 100% identical to the amino acid sequence set forth in SEQ ID NO: 219. In some embodiments, to TMPRSS4 comprises a VH comprising the amino acid sequence set forth in SEQ ID NO: 218 and a VL comprising the amino acid sequence set forth in SEQ ID NO: 219.

[0435] In some embodiments, the antibody or antigen-binding fragment that binds to human TMPRSS4 is or is derived from TMPRSS4 Ab33. In some embodiments, the antibody or antigen-binding fragment that binds to TMPRSS4 comprises a VH comprising an HCDR1 comprising the amino acid sequence set forth in SEQ ID NO: 227, an HCDR2 comprising the amino acid sequence set forth in SEQ ID NO: 228, and an HCDR3 comprising the amino acid sequence set forth in SEQ ID NO: 229, and a VL comprising an LCDR1 comprising the amino acid sequence set forth in SEQ ID NO: 230, an LCDR2 comprising the amino acid sequence set forth in SEQ ID NO: 231, and an LCDR3 comprising the amino acid sequence set forth in SEQ ID NO: 232 and/or the antibody or antigen-binding fragment that binds to TMPRSS4 comprises a VH comprising an amino acid sequence at least 80%, at least 85%, at least 90%, at least 91%, at least 92%, at least 93%, at least 94%, at least 95%, at least 96%, at least 97%, at least 98%, at least 99%, at least 99.5% or 100% identical to the amino acid sequence set forth in SEQ ID NO: 225 and a VL comprising an amino acid sequence at least 80%, at least 85%, at least 90%, at least 91%, at least 92%, at least 93%, at least 94%, at least 95%, at least 96%, at least 97%, at least 98%, at least 99%, at least 99.5% or 100% identical to the amino acid sequence set forth in SEQ ID NO: 226. In some embodiments, to TMPRSS4 comprises a VH comprising the amino acid sequence set forth in SEQ ID NO: 225 and a VL comprising the amino acid sequence set forth in SEQ ID NO: 226.

[0436] In some embodiments, the antibody or antigen-binding fragment that binds to human TMPRSS4 is or is derived from TMPRSS4 Ab34. In some embodiments, the antibody or antigen-binding fragment that binds to TMPRSS4 comprises a VH comprising an HCDR1 comprising the amino acid sequence set forth in SEQ ID NO: 235, an HCDR2 comprising the amino acid sequence set forth in SEQ ID NO: 236, and an HCDR3 comprising the amino acid sequence set forth in SEQ ID NO: 237, and a VL comprising an LCDR1 comprising the amino acid sequence set forth in SEQ ID NO: 238, an LCDR2 comprising the amino acid sequence set forth in SEQ ID NO: 239, and an LCDR3 comprising the amino acid sequence set forth in SEQ ID NO: 240 and/or the antibody or antigen-binding fragment that binds to TMPRSS4 comprises a VH comprising an amino acid sequence at least 80%, at least 85%, at least 90%, at least 91%, at least 92%, at least 93%, at least 94%, at least 95%, at least 96%, at least 97%, at least 98%, at least 99%, at least 99.5% or 100% identical to the amino acid sequence set forth in SEQ ID NO: 233 and a VL comprising an amino acid sequence at least 80%, at least 85%, at least 90%, at least 91%, at least 92%, at least 93%, at least 94%, at least 95%, at least 96%, at least 97%, at least 98%, at least 99%, at least 99.5% or 100% identical to the amino acid sequence set forth in SEQ ID NO: 234. In some embodiments, to TMPRSS4 comprises a VH comprising the amino acid sequence set forth in SEQ ID NO: 233 and a VL comprising the amino acid sequence set forth in SEQ ID NO: 234.

[0437] In some embodiments, the antibody or antigen-binding fragment that binds to human TMPRSS4 is or is derived from TMPRSS4 Ab35. In some embodiments, the antibody or antigen-binding fragment that binds to TMPRSS4 comprises a VH comprising an HCDR1 comprising the amino acid sequence set forth in SEQ ID NO: 193, an HCDR2 comprising the amino acid sequence set forth in SEQ ID NO: 243, and an HCDR3 comprising the amino acid sequence set forth in SEQ ID NO: 244, and a VL comprising an LCDR1 comprising the amino acid sequence set forth in SEQ ID NO: 6, an LCDR2 comprising the amino acid sequence set forth in SEQ ID NO: 7, and an LCDR3 comprising the amino acid sequence set forth in SEQ ID NO: 245 and/or the antibody or antigen-binding fragment that binds to TMPRSS4 comprises a VH comprising an amino acid sequence at least 80%, at least 85%, at least 90%, at least 91%, at least 92%, at least 93%, at least 94%, at least 95%, at least 96%, at least 97%, at least 98%, at least 99%, at least 99.5% or 100% identical to the amino acid sequence set forth in SEQ ID NO: 241 and a VL comprising an amino acid sequence at least 80%, at least 85%, at least 90%, at least 91%, at least 92%, at least 93%, at least 94%, at least 95%, at least 96%, at least 97%, at least 98%, at least 99%, at least 99.5% or 100% identical to the amino acid sequence set forth in SEQ ID NO: 242. In some embodiments, to TMPRSS4 comprises a VH comprising the amino acid sequence set forth in SEQ ID NO: 241 and a VL comprising the amino acid sequence set forth in SEQ ID NO: 242.

[0438] In some embodiments, the antibody or antigen-binding fragment that binds to human TMPRSS4 is or is derived from TMPRSS4 Ab36. In some embodiments, the antibody or antigen-binding fragment that binds to TMPRSS4 comprises a VH comprising an HCDR1 comprising the amino acid sequence set forth in SEQ ID NO: 248, an HCDR2 comprising the amino acid sequence set forth in SEQ ID NO: 249, and an HCDR3 comprising the amino acid sequence set forth in SEQ ID NO: 250, and a VL comprising an LCDR1 comprising the amino acid sequence set forth in SEQ ID NO: 292, an LCDR2 comprising the amino acid sequence set forth in SEQ ID NO: 251, and an LCDR3 comprising the amino acid sequence set forth in SEQ ID NO: 252 and/or the antibody or antigen-binding fragment that binds to TMPRSS4 comprises a VH comprising an amino acid sequence at least 80%, at least 85%, at least 90%, at least 91%, at least 92%, at least 93%, at least 94%, at least 95%, at least 96%, at least 97%, at least 98%, at least 99%, at least 99.5% or 100% identical to the amino acid sequence set forth in SEQ ID NO: 246 and a VL comprising an amino acid sequence at least 80%, at least 85%, at least 90%, at least 91%, at least 92%, at least 93%, at least 94%, at least 95%, at least 96%, at least 97%, at least 98%, at least 99%, at least 99.5% or 100% identical to the amino acid sequence set forth in SEQ ID NO: 247. In some embodiments, to TMPRSS4 comprises a VH comprising the amino acid sequence set forth in SEQ ID NO: 246 and a VL comprising the amino acid sequence set forth in SEQ ID NO: 247.

[0439] In some embodiments, the antibody or antigen-binding fragment that binds to human TMPRSS4 is or is derived from TMPRSS4 Ab37. In some embodiments, the antibody or antigen-binding fragment that binds to TMPRSS4 comprises a VH comprising an HCDR1 comprising the amino acid sequence set forth in SEQ ID NO: 180, an HCDR2 comprising the amino acid sequence set forth in SEQ ID NO: 255, and an HCDR3 comprising the amino acid sequence set forth in SEQ ID NO: 256, and a VL comprising an LCDR1 comprising the amino acid sequence set forth in SEQ ID NO: 139, an LCDR2 comprising the amino acid sequence set forth in SEQ ID NO: 257, and an LCDR3 comprising the amino acid sequence set forth in SEQ ID NO: 258 and/or the antibody or antigen-binding fragment that binds to TMPRSS4 comprises a VH comprising an amino acid sequence at least 80%, at least 85%, at least 90%, at least 91%, at least 92%, at least 93%, at least 94%, at least 95%, at least 96%, at least 97%, at least 98%, at least 99%, at least 99.5% or 100% identical to the amino acid sequence set forth in SEQ ID NO: 253 and a VL comprising an amino acid sequence at least 80%, at least 85%, at least 90%, at least 98%, at least 99%, at least 99.5% or 100% identical to the amino acid sequence set forth in SEQ ID NO: 254. In some embodiments, to TMPRSS4 comprises a VH comprising the amino acid sequence set forth in SEQ ID NO: 253 and a VL comprising the amino acid sequence set forth in SEQ ID NO: 254.

[0440] In some embodiments, the antibody or antigen-binding fragment that binds to human TMPRSS4 is or is derived from TMPRSS4 Ab38. In some embodiments, the antibody or antigen-binding fragment that binds to TMPRSS4 comprises a VH comprising an HCDR1 comprising the amino acid sequence set forth in SEQ ID NO: 261, an HCDR2 comprising the amino acid sequence set forth in SEQ ID NO: 50, and an HCDR3 comprising the amino acid sequence set forth in SEQ ID NO: 262, and a VL comprising an LCDR1 comprising the amino acid sequence set forth in SEQ ID NO: 263, an LCDR2 comprising the amino acid sequence set forth in SEQ ID NO: 264, and an LCDR3 comprising the amino acid sequence set forth in SEQ ID NO: 265 and/or the antibody or antigen-binding fragment that binds to TMPRSS4 comprises a VH comprising an amino acid sequence at least 80%, at least 85%, at least 90%, at least 91%, at least 92%, at least 93%, at least 94%, at least 95%, at least 96%, at least 97%, at least 98%, at least 99%, at least 99.5% or 100% identical to the amino acid sequence set forth in SEQ ID NO: 259 and a VL comprising an amino acid sequence at least 80%, at least 85%, at least 90%, at least 91%, at least 92%, at least 93%, at least 94%, at least 95%, at least 96%, at least 97%, at least 98%, at least 99%, at least 99.5% or 100% identical to the amino acid sequence set forth in SEQ ID NO: 260. In some embodiments, to TMPRSS4 comprises a VH comprising the amino acid sequence set forth in SEQ ID NO: 259 and a VL comprising the amino acid sequence set forth in SEQ ID NO: 260.

[0441] In some embodiments, the antibody or antigen-binding fragment that binds to human TMPRSS4 is or is derived from TMPRSS4 Ab39. In some embodiments, the antibody or antigen-binding fragment that binds to TMPRSS4 comprises a VH comprising an HCDR1 comprising the amino acid sequence set forth in SEQ ID NO: 268, an HCDR2 comprising the amino acid sequence set forth in SEQ ID NO: 269, and an HCDR3 comprising the amino acid sequence set forth in SEQ ID NO: 270, and a VL comprising an LCDR1 comprising the amino acid sequence set forth in SEQ ID NO: 271, an LCDR2 comprising the amino acid sequence set forth in SEQ ID NO: 272, and an LCDR3 comprising the amino acid sequence set forth in SEQ ID NO: 273 and/or the antibody or antigen-binding fragment that binds to TMPRSS4 comprises a VH comprising an amino acid sequence at least 80%, at least 85%, at least 90%, at least 91%, at least 92%, at least 93%, at least 94%, at least 95%, at least 96%, at least 97%, at least 98%, at least 99%, at least 99.5% or 100% identical to the amino acid sequence set forth in SEQ ID NO: 266 and a VL comprising an amino acid sequence at least 80%, at least 85%, at least 90%, at least 91%, at least 92%, at least 93%, at least 94%, at least 95%, at least 96%, at least 97%, at least 98%, at least 99%, at least 99.5% or 100% identical to the amino acid sequence set forth in SEQ ID NO: 267. In some embodiments, to TMPRSS4 comprises a VH comprising the amino acid sequence set forth in SEQ ID NO: 266 and a VL comprising the amino acid sequence set forth in SEQ ID NO: 267.

[0442] In some embodiments, the antibody or antigen-binding fragment that binds to human TMPRSS4 is or is derived from TMPRSS4 Ab40. In some embodiments, the antibody or antigen-binding fragment that binds to TMPRSS4 comprises a VH comprising an HCDR1 comprising the amino acid sequence set forth in SEQ ID NO: 220, an HCDR2 comprising the amino acid sequence set forth in SEQ ID NO: 276, and an HCDR3 comprising the amino acid sequence set forth in SEQ ID NO: 277, and a VL comprising an LCDR1 comprising the amino acid sequence set forth in SEQ ID NO: 278, an LCDR2 comprising the amino acid sequence set forth in SEQ ID NO: 279, and an LCDR3 comprising the amino acid sequence set forth in SEQ ID NO: 280 and/or the antibody or antigen-binding fragment that binds to TMPRSS4 comprises a VH comprising an amino acid sequence at least 80%, at least 85%, at least 90%, at least 91%, at least 92%, at least 93%, at least 94%, at least 95%, at least 96%, at least 97%, at least 98%, at least 99%, at least 99.5% or 100% identical to the amino acid sequence set forth in SEQ ID NO: 274 and a VL comprising an amino acid sequence at least 80%, at least 85%, at least 90%, at least 91%, at least 92%, at least 93%, at least 94%, at least 95%, at least 96%, at least 97%, at least 98%, at least 99%, at least 99.5% or 100% identical to the amino acid sequence set forth in SEQ ID NO: 275. In some embodiments, to TMPRSS4 comprises a VH comprising the amino acid sequence set forth in SEQ ID NO: 274 and a VL comprising the amino acid sequence set forth in SEQ ID NO: 275.

[0443] In some embodiments, the antibody or antigen-binding fragment that binds to human TMPRSS4 is or is derived from TMPRSS4 Ab41. In some embodiments, the antibody or antigen-binding fragment that binds to TMPRSS4 comprises a VH comprising an HCDR1 comprising the amino acid sequence set forth in SEQ ID NO: 220, an HCDR2 comprising the amino acid sequence set forth in SEQ ID NO: 283, and an HCDR3 comprising the amino acid sequence set forth in SEQ ID NO: 277, and a VL comprising an LCDR1 comprising the amino acid sequence set forth in SEQ ID NO: 284, an LCDR2 comprising the amino acid sequence set forth in SEQ ID NO: 239, and an LCDR3 comprising the amino acid sequence set forth in SEQ ID NO: 285 and/or the antibody or antigen-binding fragment that binds to TMPRSS4 comprises a VH comprising an amino acid sequence at least 80%, at least 85%, at least 90%, at least 91%, at least 92%, at least 93%, at least 94%, at least 95%, at least 96%, at least 97%, at least 98%, at least 99%, at least 99.5% or 100% identical to the amino acid sequence set forth in SEQ ID NO: 281 and a VL comprising an amino acid sequence at least 80%, at least 85%, at least 90%, at least 91%, at least 92%, at least 93%, at least 94%, at least 95%, at least 96%, at least 97%, at least 98%, at least 99%, at least 99.5% or 100% identical to the amino acid sequence set forth in SEQ ID NO: 282. In some embodiments, to TMPRSS4 comprises a VH comprising the amino acid sequence set forth in SEQ ID NO: 281 and a VL comprising the amino acid sequence set forth in SEQ ID NO: 282.

[0444] In some embodiments, the antibody or antigen-binding fragment that binds to human TMPRSS4 is or is derived from TMPRSS4 Ab42. In some embodiments, the antibody or antigen-binding fragment that binds to TMPRSS4 comprises a VH comprising an HCDR1 comprising the amino acid sequence set forth in SEQ ID NO: 288, an HCDR2 comprising the amino acid sequence set forth in SEQ ID NO: 194, and an HCDR3 comprising the amino acid sequence set forth in SEQ ID NO: 289, and a VL comprising an LCDR1 comprising the amino acid sequence set forth in SEQ ID NO: 290, an LCDR2 comprising the amino acid sequence set forth in SEQ ID NO: 291, and an LCDR3 comprising the amino acid sequence set forth in SEQ ID NO: 293 and/or the antibody or antigen-binding fragment that binds to TMPRSS4 comprises a VH comprising an amino acid sequence at least 80%, at least 85%, at least 90%, at least 91%, at least 92%, at least 93%, at least 94%, at least 95%, at least 96%, at least 97%, at least 98%, at least 99%, at least 99.5% or 100% identical to the amino acid sequence set forth in SEQ ID NO: 286 and a VL comprising an amino acid sequence at least 80%, at least 85%, at least 90%, at least 91%, at least 92%, at least 93%, at least 94%, at least 95%, at least 96%, at least 97%, at least 98%, at least 99%, at least 99.5% or 100% identical to the amino acid sequence set forth in SEQ ID NO: 287. In some embodiments, to TMPRSS4 comprises a VH comprising the amino acid sequence set forth in SEQ ID NO: 286 and a VL comprising the amino acid sequence set forth in SEQ ID NO: 287.

[0445] In some embodiments, the antibody or antigen-binding fragment that binds to human TMPRSS4 is or is derived from TMPRSS4 Ab43. In some embodiments, the antibody or antigen-binding fragment that binds to TMPRSS4 comprises a VH comprising an HCDR1 comprising the amino acid sequence set forth in SEQ ID NO: 296, an HCDR2 comprising the amino acid sequence set forth in SEQ ID NO: 297, and an HCDR3 comprising the amino acid sequence set forth in SEQ ID NO: 298, and a VL comprising an LCDR1 comprising the amino acid sequence set forth in SEQ ID NO: 6, an LCDR2 comprising the amino acid sequence set forth in SEQ ID NO: 15, and an LCDR3 comprising the amino acid sequence set forth in SEQ ID NO: 152 and/or the antibody or antigen-binding fragment that binds to TMPRSS4 comprises a VH comprising an amino acid sequence at least 80%, at least 85%, at least 90%, at least 91%, at least 92%, at least 93%, at least 94%, at least 95%, at least 96%, at least 97%, at least 98%, at least 99%, at least 99.5% or 100% identical to the amino acid sequence set forth in SEQ ID NO: 294 and a VL comprising an amino acid sequence at least 80%, at least 85%, at least 90%, at least 91%, at least 92%, at least 93%, at least 94%, at least 95%, at least 96%, at least 97%, at least 98%, at least 99%, at least 99.5% or 100% identical to the amino acid sequence set forth in SEQ ID NO: 295. In some embodiments, to TMPRSS4 comprises a VH comprising the amino acid sequence set forth in SEQ ID NO: 294 and a VL comprising the amino acid sequence set forth in SEQ ID NO: 295.

[0446] In some embodiments, the antibody or antigen-binding fragment that binds to human TMPRSS4 is or is derived from TMPRSS4 Ab44. In some embodiments, the antibody or antigen-binding fragment that binds to TMPRSS4 comprises a VH comprising an HCDR1 comprising the amino acid sequence set forth in SEQ ID NO: 301, an HCDR2 comprising the amino acid sequence set forth in SEQ ID NO: 80, and an HCDR3 comprising the amino acid sequence set forth in SEQ ID NO: 302, and a VL comprising an LCDR1 comprising the amino acid sequence set forth in SEQ ID NO: 6, an LCDR2 comprising the amino acid sequence set forth in SEQ ID NO: 303, and an LCDR3 comprising the amino acid sequence set forth in SEQ ID NO: 304 and/or the antibody or antigen-binding fragment that binds to TMPRSS4 comprises a VH comprising an amino acid sequence at least 80%, at least 85%, at least 90%, at least 91%, least 99%, at least 99.5% or 100% identical to the amino acid sequence set forth in SEQ ID NO: 299 and a VL comprising an amino acid sequence at least 80%, at least 85%, at least 90%, at least 91%, at least 92%, at least 93%, at least 94%, at least 95%, at least 96%, at least 97%, at least 98%, at least 99%, at least 99.5% or 100% identical to the amino acid sequence set forth in SEQ ID NO: 300. In some embodiments, to TMPRSS4 comprises a VH comprising the amino acid sequence set forth in SEQ ID NO: 299 and a VL comprising the amino acid sequence set forth in SEQ ID NO: 300.

[0447] In some embodiments, the antibody or antigen-binding fragment that binds to human TMPRSS4 is or is derived from TMPRSS4 Ab45. In some embodiments, the antibody or antigen-binding fragment that binds to TMPRSS4 comprises a VH comprising an HCDR1 comprising the amino acid sequence set forth in SEQ ID NO: 307, an HCDR2 comprising the amino acid sequence set forth in SEQ ID NO: 80, and an HCDR3 comprising the amino acid sequence set forth in SEQ ID NO: 308, and a VL comprising an LCDR1 comprising the amino acid sequence set forth in SEQ ID NO: 309, an LCDR2 comprising the amino acid sequence set forth in SEQ ID NO: 310, and an LCDR3 comprising the amino acid sequence set forth in SEQ ID NO: 311 and/or the antibody or antigen-binding fragment that binds to TMPRSS4 comprises a VH comprising an amino acid sequence at least 80%, at least 85%, at least 90%, at least 91%, at least 92%, at least 93%, at least 94%, at least 95%, at least 96%, at least 97%, at least 98%, at least 99%, at least 99.5% or 100% identical to the amino acid sequence set forth in SEQ ID NO: 305 and a VL comprising an amino acid sequence at least 80%, at least 85%, at least 90%, at least 91%, at least 92%, at least 93%, at least 94%, at least 95%, at least 96%, at least 97%, at least 98%, at least 99%, at least 99.5% or 100% identical to the amino acid sequence set forth in SEQ ID NO: 306. In some embodiments, to TMPRSS4 comprises a VH comprising the amino acid sequence set forth in SEQ ID NO: 305 and a VL comprising the amino acid sequence set forth in SEQ ID NO: 306.

[0448] In some embodiments, the antibody or antigen-binding fragment that binds to human TMPRSS4 is or is derived from TMPRSS4 Ab46. In some embodiments, the antibody or antigen-binding fragment that binds to TMPRSS4 comprises a VH comprising an HCDR1 comprising the amino acid sequence set forth in SEQ ID NO: 49, an HCDR2 comprising the amino acid sequence set forth in SEQ ID NO: 66, and an HCDR3 comprising the amino acid sequence set forth in SEQ ID NO: 110, and a VL comprising an LCDR1 comprising the amino acid sequence set forth in SEQ ID NO: 292, an LCDR2 comprising the amino acid sequence set forth in SEQ ID NO: 15, and an LCDR3 comprising the amino acid sequence set forth in SEQ ID NO: 314 and/or the antibody or antigen-binding fragment that binds to TMPRSS4 comprises a VH comprising an amino acid sequence at least 80%, at least 85%, at least 90%, at least 91%, at least 92%, at least 93%, at least 94%, at least 95%, at least 96%, at least 97%, at least 98%, at least 99%, at least 99.5% or 100% identical to the amino acid sequence set forth in SEQ ID NO: 312 and a VL comprising an amino acid sequence at least 80%, at least 85%, at least 90%, at least 91%, at least 92%, at least 93%, at least 94%, at least 95%, at least 96%, at least 97%, at least 98%, at least 99%, at least 99.5% or 100% identical to the amino acid sequence set forth in SEQ ID NO: 313. In some embodiments, to TMPRSS4 comprises a VH comprising the amino acid sequence set forth in SEQ ID NO: 312 and a VL comprising the amino acid sequence set forth in SEQ ID NO: 313.

[0449] In some embodiments, the antibody or antigen-binding fragment that binds to human TMPRSS4 is or is derived from TMPRSS4 Ab47. In some embodiments, the antibody or antigen-binding fragment that binds to TMPRSS4 comprises a VH comprising an HCDR1 comprising the amino acid sequence set forth in SEQ ID NO: 317, an HCDR2 comprising the amino acid sequence set forth in SEQ ID NO: 194, and an HCDR3 comprising the amino acid sequence set forth in SEQ ID NO: 318, and a VL comprising an LCDR1 comprising the amino acid sequence set forth in SEQ ID NO: 278, an LCDR2 comprising the amino acid sequence set forth in SEQ ID NO: 15, and an LCDR3 comprising the amino acid sequence set forth in SEQ ID NO: 252 and/or the antibody or antigen-binding fragment that binds to TMPRSS4 comprises a VH comprising an amino acid sequence at least 80%, at least 85%, at least 90%, at least 91%, at least 92%, at least 93%, at least 94%, at least 95%, at least 96%, at least 97%, at least 98%, at least 99%, at least 99.5% or 100% identical to the amino acid sequence set forth in SEQ ID NO: 315 and a VL comprising an amino acid sequence at least 80%, at least 85%, at least 90%, at least 91%, at least 92%, at least 93%, at least 94%, at least 95%, at least 96%, at least 97%, at least 98%, at least 99%, at least 99.5% or 100% identical to the amino acid sequence set forth in SEQ ID NO: 316. In some embodiments, to TMPRSS4 comprises a VH comprising the amino acid sequence set forth in SEQ ID NO: 315 and a VL comprising the amino acid sequence set forth in SEQ ID NO: 316.

[0450] In some embodiments, the antibody or antigen-binding fragment that binds to human TMPRSS4 is or is derived from TMPRSS4 Ab48. In some embodiments, the antibody or antigen-binding fragment that binds to TMPRSS4 comprises a VH comprising an HCDR1 comprising the amino acid sequence set forth in SEQ ID NO: 321, an HCDR2 comprising the amino acid sequence set forth in SEQ ID NO: 322, and an HCDR3 comprising the amino acid sequence set forth in SEQ ID NO: 323, and a VL comprising an LCDR1 comprising the amino acid sequence set forth in SEQ ID NO: 324, an LCDR2 comprising the amino acid sequence set forth in SEQ ID NO: 325, and an LCDR3 comprising the amino acid sequence set forth in SEQ ID NO: 16 and/or the antibody or antigen-binding fragment that binds to TMPRSS4 comprises a VH comprising an amino acid sequence at least 80%, at least 85%, at least 90%, at least 91%, at least 92%, at least 93%, at least 94%, at least 95%, at least 96%, at least 97%, at least 98%, at least 99%, at least 99.5% or 100% identical to the amino acid sequence set forth in SEQ ID NO: 319 and a VL comprising an amino acid sequence at least 80%, at least 85%, at least 90%, at least 91%, at least 92%, at least 93%, at least 94%, at least 95%, at least 96%, at least 97%, at least 98%, at least 99%, at least 99.5% or 100% identical to the amino acid sequence set forth in SEQ ID NO: 320. In some embodiments, to TMPRSS4 comprises a VH comprising the amino acid sequence set forth in SEQ ID NO: 319 and a VL comprising the amino acid sequence set forth in SEQ ID NO: 320.

[0451] In some embodiments, the antibody or antigen-binding fragment that binds to human TMPRSS4 is or is derived from TMPRSS4 Ab49. In some embodiments, the antibody or antigen-binding fragment that binds to TMPRSS4 comprises a VH comprising an HCDR1 comprising the amino acid sequence set forth in SEQ ID NO: 193, an HCDR2 comprising the amino acid sequence set forth in SEQ ID NO: 80, and an HCDR3 comprising the amino acid sequence set forth in SEQ ID NO: 328, and a VL comprising an LCDR1 comprising the amino acid sequence set forth in SEQ ID NO: 329, an LCDR2 comprising the amino acid sequence set forth in SEQ ID NO: 330, and an LCDR3 comprising the amino acid sequence set forth in SEQ ID NO: 331 and/or the antibody or antigen-binding fragment that binds to TMPRSS4 comprises a VH comprising an amino acid sequence at least 80%, at least 85%, at least 90%, at least 91%, at least 92%, at least 93%, at least 94%, at least 95%, at least 96%, at least 97%, at least 98%, at least 99%, at least 99.5% or 100% identical to the amino acid sequence set forth in SEQ ID NO: 326 and a VL comprising an amino acid sequence at least 80%, at least 85%, at least 90%, at least 98%, at least 99%, at least 99.5% or 100% identical to the amino acid sequence set forth in SEQ ID NO: 327. In some embodiments, to TMPRSS4 comprises a VH comprising the amino acid sequence set forth in SEQ ID NO: 326 and a VL comprising the amino acid sequence set forth in SEQ ID NO: 327.

[0452] In some embodiments, the antibody or antigen-binding fragment that binds to human TMPRSS4 is or is derived from TMPRSS4 Ab50. In some embodiments, the antibody or antigen-binding fragment that binds to TMPRSS4 comprises a VH comprising an HCDR1 comprising the amino acid sequence set forth in SEQ ID NO: 193, an HCDR2 comprising the amino acid sequence set forth in SEQ ID NO: 334, and an HCDR3 comprising the amino acid sequence set forth in SEQ ID NO: 110, and a VL comprising an LCDR1 comprising the amino acid sequence set forth in SEQ ID NO: 324, an LCDR2 comprising the amino acid sequence set forth in SEQ ID NO: 335, and an LCDR3 comprising the amino acid sequence set forth in SEQ ID NO: 336 and/or the antibody or antigen-binding fragment that binds to TMPRSS4 comprises a VH comprising an amino acid sequence at least 80%, at least 85%, at least 90%, at least 91%, at least 92%, at least 93%, at least 94%, at least 95%, at least 96%, at least 97%, at least 98%, at least 99%, at least 99.5% or 100% identical to the amino acid sequence set forth in SEQ ID NO: 332 and a VL comprising an amino acid sequence at least 80%, at least 85%, at least 90%, at least 91%, at least 92%, at least 93%, at least 94%, at least 95%, at least 96%, at least 97%, at least 98%, at least 99%, at least 99.5% or 100% identical to the amino acid sequence set forth in SEQ ID NO: 333. In some embodiments, to TMPRSS4 comprises a VH comprising the amino acid sequence set forth in SEQ ID NO: 332 and a VL comprising the amino acid sequence set forth in SEQ ID NO: 333.

[0453] In some embodiments, the antibody or antigen-binding fragment that binds to human TMPRSS4 is or is derived from TMPRSS4 Ab51. In some embodiments, the antibody or antigen-binding fragment that binds to TMPRSS4 comprises a VH comprising an HCDR1 comprising the amino acid sequence set forth in SEQ ID NO: 93, an HCDR2 comprising the amino acid sequence set forth in SEQ ID NO: 338, and an HCDR3 comprising the amino acid sequence set forth in SEQ ID NO: 339, and a VL comprising an LCDR1 comprising the amino acid sequence set forth in SEQ ID NO: 278, an LCDR2 comprising the amino acid sequence set forth in SEQ ID NO: 15, and an LCDR3 comprising the amino acid sequence set forth in SEQ ID NO: 252 and/or the antibody or antigen-binding fragment that binds to TMPRSS4 comprises a VH comprising an amino acid sequence at least 80%, at least 85%, at least 90%, at least 91%, at least 92%, at least 93%, at least 94%, at least 95%, at least 96%, at least 97%, at least 98%, at least 99%, at least 99.5% or 100% identical to the amino acid sequence set forth in SEQ ID NO: 337 and a VL comprising an amino acid sequence at least 80%, at least 85%, at least 90%, at least 91%, at least 92%, at least 93%, at least 94%, at least 95%, at least 96%, at least 97%, at least 98%, at least 99%, at least 99.5% or 100% identical to the amino acid sequence set forth in SEQ ID NO: 316. In some embodiments, to TMPRSS4 comprises a VH comprising the amino acid sequence set forth in SEQ ID NO: 337 and a VL comprising the amino acid sequence set forth in SEQ ID NO: 316.

[0454] In some embodiments, the antibody or antigen-binding fragment that binds to human TMPRSS4 is or is derived from TMPRSS4 Ab52. In some embodiments, the antibody or antigen-binding fragment that binds to TMPRSS4 comprises a VH comprising an HCDR1 comprising the amino acid sequence set forth in SEQ ID NO: 342, an HCDR2 comprising the amino acid sequence set forth in SEQ ID NO: 343, and an HCDR3 comprising the amino acid sequence set forth in SEQ ID NO: 344, and a VL comprising an LCDR1 comprising the amino acid sequence set forth in SEQ ID NO: 345, an LCDR2 comprising the amino acid sequence set forth in SEQ ID NO: 90, and an LCDR3 comprising the amino acid sequence set forth in SEQ ID NO: 346 and/or the antibody or antigen-binding fragment that binds to TMPRSS4 comprises a VH comprising an amino acid sequence at least 80%, at least 85%, at least 90%, at least 91%, at least 92%, at least 93%, at least 94%, at least 95%, at least 96%, at least 97%, at least 98%, at least 99%, at least 99.5% or 100% identical to the amino acid sequence set forth in SEQ ID NO: 340 and a VL comprising an amino acid sequence at least 80%, at least 85%, at least 90%, at least 91%, at least 92%, at least 93%, at least 94%, at least 95%, at least 96%, at least 97%, at least 98%, at least 99%, at least 99.5% or 100% identical to the amino acid sequence set forth in SEQ ID NO: 341. In some embodiments, to TMPRSS4 comprises a VH comprising the amino acid sequence set forth in SEQ ID NO: 340 and a VL comprising the amino acid sequence set forth in SEQ ID NO: 341.

[0455] In some embodiments, the antibody or antigen-binding fragment that binds to human TMPRSS4 is or is derived from TMPRSS4 Ab53. In some embodiments, the antibody or antigen-binding fragment that binds to TMPRSS4 comprises a VH comprising an HCDR1 comprising the amino acid sequence set forth in SEQ ID NO: 65, an HCDR2 comprising the amino acid sequence set forth in SEQ ID NO: 349, and an HCDR3 comprising the amino acid sequence set forth in SEQ ID NO: 229, and a VL comprising an LCDR1 comprising the amino acid sequence set forth in SEQ ID NO: 350, an LCDR2 comprising the amino acid sequence set forth in SEQ ID NO: 351, and an LCDR3 comprising the amino acid sequence set forth in SEQ ID NO: 352 and/or the antibody or antigen-binding fragment that binds to TMPRSS4 comprises a VH comprising an amino acid sequence at least 80%, at least 85%, at least 90%, at least 91%, at least 92%, at least 93%, at least 94%, at least 95%, at least 96%, at least 97%, at least 98%, at least 99%, at least 99.5% or 100% identical to the amino acid sequence set forth in SEQ ID NO: 347 and a VL comprising an amino acid sequence at least 80%, at least 85%, at least 90%, at least 91%, at least 92%, at least 93%, at least 94%, at least 95%, at least 96%, at least 97%, at least 98%, at least 99%, at least 99.5% or 100% identical to the amino acid sequence set forth in SEQ ID NO: 348. In some embodiments, to TMPRSS4 comprises a VH comprising the amino acid sequence set forth in SEQ ID NO: 347 and a VL comprising the amino acid sequence set forth in SEQ ID NO: 348.

[0456] In some embodiments, the antibody or antigen-binding fragment that binds to human TMPRSS4 is or is derived from TMPRSS4 Ab54. In some embodiments, the antibody or antigen-binding fragment that binds to TMPRSS4 comprises a VH comprising an HCDR1 comprising the amino acid sequence set forth in SEQ ID NO: 355, an HCDR2 comprising the amino acid sequence set forth in SEQ ID NO: 194, and an HCDR3 comprising the amino acid sequence set forth in SEQ ID NO: 110, and a VL comprising an LCDR1 comprising the amino acid sequence set forth in SEQ ID NO: 324, an LCDR2 comprising the amino acid sequence set forth in SEQ ID NO: 15, and an LCDR3 comprising the amino acid sequence set forth in SEQ ID NO: 280 and/or the antibody or antigen-binding fragment that binds to TMPRSS4 comprises a VH comprising an amino acid sequence at least 80%, at least 85%, at least 90%, at least 91%, at least 92%, at least 93%, at least 94%, at least 95%, at least 96%, at least 97%, at least 98%, at least 99%, at least 99.5% or 100% identical to the amino acid sequence set forth in SEQ ID NO: 353 and a VL comprising an amino acid sequence at least 80%, at least 85%, at least 90%, at least 91%, at least 92%, at least 93%, at least 94%, at least 95%, at least 96%, at least 97%, at least 98%, at least 99%, at least 99.5% or 100% identical to the amino acid sequence set forth in SEQ ID NO: 354. In some embodiments, to TMPRSS4 comprises a VH comprising the amino acid sequence set forth in SEQ ID NO: 353 and a VL comprising the amino acid sequence set forth in SEQ ID NO: 354.

[0457] In some embodiments, the antibody or antigen-binding fragment that binds to human TMPRSS4 is or is derived from TMPRSS4 Ab55. In some embodiments, the antibody or antigen-binding fragment that binds to TMPRSS4 comprises a VH comprising an HCDR1 comprising the amino acid sequence set forth in SEQ ID NO: 207, an HCDR2 comprising the amino acid sequence set forth in SEQ ID NO: 58, and an HCDR3 comprising the amino acid sequence set forth in SEQ ID NO: 358, and a VL comprising an LCDR1 comprising the amino acid sequence set forth in SEQ ID NO: 60, an LCDR2 comprising the amino acid sequence set forth in SEQ ID NO: 15, and an LCDR3 comprising the amino acid sequence set forth in SEQ ID NO: 359 and/or the antibody or antigen-binding fragment that binds to TMPRSS4 comprises a VH comprising an amino acid sequence at least 80%, at least 85%, at least 90%, at least 91%, at least 92%, at least 93%, at least 94%, at least 95%, at least 96%, at least 97%, at least 98%, at least 99%, at least 99.5% or 100% identical to the amino acid sequence set forth in SEQ ID NO: 356 and a VL comprising an amino acid sequence at least 80%, at least 85%, at least 90%, at least 91%, at least 92%, at least 93%, at least 94%, at least 95%, at least 96%, at least 97%, at least 98%, at least 99%, at least 99.5% or 100% identical to the amino acid sequence set forth in SEQ ID NO: 357. In some embodiments, to TMPRSS4 comprises a VH comprising the amino acid sequence set forth in SEQ ID NO: 356 and a VL comprising the amino acid sequence set forth in SEQ ID NO: 357.

[0458] In some embodiments, the antibody or antigen-binding fragment that binds to human TMPRSS4 is or is derived from TMPRSS4 Ab56. In some embodiments, the antibody or antigen-binding fragment that binds to TMPRSS4 comprises a VH comprising an HCDR1 comprising the amino acid sequence set forth in SEQ ID NO: 362, an HCDR2 comprising the amino acid sequence set forth in SEQ ID NO: 363, and an HCDR3 comprising the amino acid sequence set forth in SEQ ID NO: 364, and a VL comprising an LCDR1 comprising the amino acid sequence set forth in SEQ ID NO: 29, an LCDR2 comprising the amino acid sequence set forth in SEQ ID NO: 203, and an LCDR3 comprising the amino acid sequence set forth in SEQ ID NO: 365 and/or the antibody or antigen-binding fragment that binds to TMPRSS4 comprises a VH comprising an amino acid sequence at least 80%, at least 85%, at least 90%, at least 91%, least 99%, at least 99.5% or 100% identical to the amino acid sequence set forth in SEQ ID NO: 360 and a VL comprising an amino acid sequence at least 80%, at least 85%, at least 90%, at least 91%, at least 92%, at least 93%, at least 94%, at least 95%, at least 96%, at least 97%, at least 98%, at least 99%, at least 99.5% or 100% identical to the amino acid sequence set forth in SEQ ID NO: 361. In some embodiments, to TMPRSS4 comprises a VH comprising the amino acid sequence set forth in SEQ ID NO: 360 and a VL comprising the amino acid sequence set forth in SEQ ID NO: 361.

[0459] In some embodiments, the antibody or antigen-binding fragment that binds to human TMPRSS4 is or is derived from TMPRSS4 Ab57. In some embodiments, the antibody or antigen-binding fragment that binds to TMPRSS4 comprises a VH comprising an HCDR1 comprising the amino acid sequence set forth in SEQ ID NO: 317, an HCDR2 comprising the amino acid sequence set forth in SEQ ID NO: 80, and an HCDR3 comprising the amino acid sequence set forth in SEQ ID NO: 368, and a VL comprising an LCDR1 comprising the amino acid sequence set forth in SEQ ID NO: 29, an LCDR2 comprising the amino acid sequence set forth in SEQ ID NO: 203, and an LCDR3 comprising the amino acid sequence set forth in SEQ ID NO: 369 and/or the antibody or antigen-binding fragment that binds to TMPRSS4 comprises a VH comprising an amino acid sequence at least 80%, at least 85%, at least 90%, at least 91%, at least 92%, at least 93%, at least 94%, at least 95%, at least 96%, at least 97%, at least 98%, at least 99%, at least 99.5% or 100% identical to the amino acid sequence set forth in SEQ ID NO: 366 and a VL comprising an amino acid sequence at least 80%, at least 85%, at least 90%, at least 91%, at least 92%, at least 93%, at least 94%, at least 95%, at least 96%, at least 97%, at least 98%, at least 99%, at least 99.5% or 100% identical to the amino acid sequence set forth in SEQ ID NO: 367. In some embodiments, to TMPRSS4 comprises a VH comprising the amino acid sequence set forth in SEQ ID NO: 366 and a VL comprising the amino acid sequence set forth in SEQ ID NO: 367.

[0460] In some embodiments, the antibody or antigen-binding fragment that binds to human TMPRSS4 is or is derived from TMPRSS4 Ab58. In some embodiments, the antibody or antigen-binding fragment that binds to TMPRSS4 comprises a VH comprising an HCDR1 comprising the amino acid sequence set forth in SEQ ID NO: 372, an HCDR2 comprising the amino acid sequence set forth in SEQ ID NO: 373, and an HCDR3 comprising the amino acid sequence set forth in SEQ ID NO: 374, and a VL comprising an LCDR1 comprising the amino acid sequence set forth in SEQ ID NO: 29, an LCDR2 comprising the amino acid sequence set forth in SEQ ID NO: 203, and an LCDR3 comprising the amino acid sequence set forth in SEQ ID NO: 375 and/or the antibody or antigen-binding fragment that binds to TMPRSS4 comprises a VH comprising an amino acid sequence at least 80%, at least 85%, at least 90%, at least 91%, at least 92%, at least 93%, at least 94%, at least 95%, at least 96%, at least 97%, at least 98%, at least 99%, at least 99.5% or 100% identical to the amino acid sequence set forth in SEQ ID NO: 370 and a VL comprising an amino acid sequence at least 80%, at least 85%, at least 90%, at least 91%, at least 92%, at least 93%, at least 94%, at least 95%, at least 96%, at least 97%, at least 98%, at least 99%, at least 99.5% or 100% identical to the amino acid sequence set forth in SEQ ID NO: 371. In some embodiments, to TMPRSS4 comprises a VH comprising the amino acid sequence set forth in SEQ ID NO: 370 and a VL comprising the amino acid sequence set forth in SEQ ID NO: 371.

[0461] In some embodiments, the antibody or antigen-binding fragment that binds to human TMPRSS4 is or is derived from TMPRSS4 Ab59. In some embodiments, the antibody or antigen-binding fragment that binds to TMPRSS4 comprises a VH comprising an HCDR1 comprising the amino acid sequence set forth in SEQ ID NO: 378, an HCDR2 comprising the amino acid sequence set forth in SEQ ID NO: 379, and an HCDR3 comprising the amino acid sequence set forth in SEQ ID NO: 380, and a VL comprising an LCDR1 comprising the amino acid sequence set forth in SEQ ID NO: 175, an LCDR2 comprising the amino acid sequence set forth in SEQ ID NO: 38, and an LCDR3 comprising the amino acid sequence set forth in SEQ ID NO: 381 and/or the antibody or antigen-binding fragment that binds to TMPRSS4 comprises a VH comprising an amino acid sequence at least 80%, at least 85%, at least 90%, at least 91%, at least 92%, at least 93%, at least 94%, at least 95%, at least 96%, at least 97%, at least 98%, at least 99%, at least 99.5% or 100% identical to the amino acid sequence set forth in SEQ ID NO: 376 and a VL comprising an amino acid sequence at least 80%, at least 85%, at least 90%, at least 91%, at least 92%, at least 93%, at least 94%, at least 95%, at least 96%, at least 97%, at least 98%, at least 99%, at least 99.5% or 100% identical to the amino acid sequence set forth in SEQ ID NO: 377. In some embodiments, to TMPRSS4 comprises a VH comprising the amino acid sequence set forth in SEQ ID NO: 376 and a VL comprising the amino acid sequence set forth in SEQ ID NO: 377.

[0462] In some embodiments, the antibody or antigen-binding fragment that binds to human TMPRSS4 is or is derived from TMPRSS4 Ab60. In some embodiments, the antibody or antigen-binding fragment that binds to TMPRSS4 comprises a VH comprising an HCDR1 comprising the amino acid sequence set forth in SEQ ID NO: 384, an HCDR2 comprising the amino acid sequence set forth in SEQ ID NO: 58, and an HCDR3 comprising the amino acid sequence set forth in SEQ ID NO: 385, and a VL comprising an LCDR1 comprising the amino acid sequence set forth in SEQ ID NO: 386, an LCDR2 comprising the amino acid sequence set forth in SEQ ID NO: 38, and an LCDR3 comprising the amino acid sequence set forth in SEQ ID NO: 387 and/or the antibody or antigen-binding fragment that binds to TMPRSS4 comprises a VH comprising an amino acid sequence at least 80%, at least 85%, at least 90%, at least 91%, at least 92%, at least 93%, at least 94%, at least 95%, at least 96%, at least 97%, at least 98%, at least 99%, at least 99.5% or 100% identical to the amino acid sequence set forth in SEQ ID NO: 382 and a VL comprising an amino acid sequence at least 80%, at least 85%, at least 90%, at least 91%, at least 92%, at least 93%, at least 94%, at least 95%, at least 96%, at least 97%, at least 98%, at least 99%, at least 99.5% or 100% identical to the amino acid sequence set forth in SEQ ID NO: 383. In some embodiments, to TMPRSS4 comprises a VH comprising the amino acid sequence set forth in SEQ ID NO: 382 and a VL comprising the amino acid sequence set forth in SEQ ID NO: 383.

[0463] In some embodiments, the antibody or antigen-binding fragment that binds to human TMPRSS4 is or is derived from TMPRSS4 Ab61. In some embodiments, the antibody or antigen-binding fragment that binds to TMPRSS4 comprises a VH comprising an HCDR1 comprising the amino acid sequence set forth in SEQ ID NO: 93, an HCDR2 comprising the amino acid sequence set forth in SEQ ID NO: 390, and an HCDR3 comprising the amino acid sequence set forth in SEQ ID NO: 163, and a VL comprising an LCDR1 comprising the amino acid sequence set forth in SEQ ID NO: 75, an LCDR2 comprising the amino acid sequence set forth in SEQ ID NO: 38, and an LCDR3 comprising the amino acid sequence set forth in SEQ ID NO: 391 and/or the antibody or antigen-binding fragment that binds to TMPRSS4 comprises a VH comprising an amino acid sequence at least 80%, at least 85%, at least 90%, at least 91%, at least 92%, at least 93%, at least 94%, at least 95%, at least 96%, at least 97%, at least 98%, at least 99%, at least 99.5% or 100% identical to the amino acid sequence set forth in SEQ ID NO: 388 and a VL comprising an amino acid sequence at least 80%, at least 85%, at least 90%, at least 98%, at least 99%, at least 99.5% or 100% identical to the amino acid sequence set forth in SEQ ID NO: 389. In some embodiments, to TMPRSS4 comprises a VH comprising the amino acid sequence set forth in SEQ ID NO: 388 and a VL comprising the amino acid sequence set forth in SEQ ID NO: 389.

[0464] In some embodiments, the antibody or antigen-binding fragment that binds to human TMPRSS4 is or is derived from TMPRSS4 Ab62. In some embodiments, the antibody or antigen-binding fragment that binds to TMPRSS4 comprises a VH comprising an HCDR1 comprising the amino acid sequence set forth in SEQ ID NO: 394, an HCDR2 comprising the amino acid sequence set forth in SEQ ID NO: 395, and an HCDR3 comprising the amino acid sequence set forth in SEQ ID NO: 396, and a VL comprising an LCDR1 comprising the amino acid sequence set forth in SEQ ID NO: 44, an LCDR2 comprising the amino acid sequence set forth in SEQ ID NO: 45, and an LCDR3 comprising the amino acid sequence set forth in SEQ ID NO: 397 and/or the antibody or antigen-binding fragment that binds to TMPRSS4 comprises a VH comprising an amino acid sequence at least 80%, at least 85%, at least 90%, at least 91%, at least 92%, at least 93%, at least 94%, at least 95%, at least 96%, at least 97%, at least 98%, at least 99%, at least 99.5% or 100% identical to the amino acid sequence set forth in SEQ ID NO: 392 and a VL comprising an amino acid sequence at least 80%, at least 85%, at least 90%, at least 91%, at least 92%, at least 93%, at least 94%, at least 95%, at least 96%, at least 97%, at least 98%, at least 99%, at least 99.5% or 100% identical to the amino acid sequence set forth in SEQ ID NO: 393. In some embodiments, to TMPRSS4 comprises a VH comprising the amino acid sequence set forth in SEQ ID NO: 392 and a VL comprising the amino acid sequence set forth in SEQ ID NO: 393.

[0465] In some embodiments, the antibody or antigen-binding fragment that binds to human TMPRSS4 is or is derived from TMPRSS4 Ab63. In some embodiments, the antibody or antigen-binding fragment that binds to TMPRSS4 comprises a VH comprising an HCDR1 comprising the amino acid sequence set forth in SEQ ID NO: 400, an HCDR2 comprising the amino acid sequence set forth in SEQ ID NO: 401, and an HCDR3 comprising the amino acid sequence set forth in SEQ ID NO: 402, and a VL comprising an LCDR1 comprising the amino acid sequence set forth in SEQ ID NO: 44, an LCDR2 comprising the amino acid sequence set forth in SEQ ID NO: 45, and an LCDR3 comprising the amino acid sequence set forth in SEQ ID NO: 403 and/or the antibody or antigen-binding fragment that binds to TMPRSS4 comprises a VH comprising an amino acid sequence at least 80%, at least 85%, at least 90%, at least 91%, at least 92%, at least 93%, at least 94%, at least 95%, at least 96%, at least 97%, at least 98%, at least 99%, at least 99.5% or 100% identical to the amino acid sequence set forth in SEQ ID NO: 398 and a VL comprising an amino acid sequence at least 80%, at least 85%, at least 90%, at least 91%, at least 92%, at least 93%, at least 94%, at least 95%, at least 96%, at least 97%, at least 98%, at least 99%, at least 99.5% or 100% identical to the amino acid sequence set forth in SEQ ID NO: 399. In some embodiments, to TMPRSS4 comprises a VH comprising the amino acid sequence set forth in SEQ ID NO: 398 and a VL comprising the amino acid sequence set forth in SEQ ID NO: 399.

[0466] In some embodiments, the antibody or antigen-binding fragment that binds to human TMPRSS4 is or is derived from TMPRSS4 Ab64. In some embodiments, the antibody or antigen-binding fragment that binds to TMPRSS4 comprises a VH comprising an HCDR1 comprising the amino acid sequence set forth in SEQ ID NO: 193, an HCDR2 comprising the amino acid sequence set forth in SEQ ID NO: 406, and an HCDR3 comprising the amino acid sequence set forth in SEQ ID NO: 407, and a VL comprising an LCDR1 comprising the amino acid sequence set forth in SEQ ID NO: 44, an LCDR2 comprising the amino acid sequence set forth in SEQ ID NO: 45, and an LCDR3 comprising the amino acid sequence set forth in SEQ ID NO: 408 and/or the antibody or antigen-binding fragment that binds to TMPRSS4 comprises a VH comprising an amino acid sequence at least 80%, at least 85%, at least 90%, at least 91%, at least 92%, at least 93%, at least 94%, at least 95%, at least 96%, at least 97%, at least 98%, at least 99%, at least 99.5% or 100% identical to the amino acid sequence set forth in SEQ ID NO: 404 and a VL comprising an amino acid sequence at least 80%, at least 85%, at least 90%, at least 91%, at least 92%, at least 93%, at least 94%, at least 95%, at least 96%, at least 97%, at least 98%, at least 99%, at least 99.5% or 100% identical to the amino acid sequence set forth in SEQ ID NO: 405. In some embodiments, to TMPRSS4 comprises a VH comprising the amino acid sequence set forth in SEQ ID NO: 404 and a VL comprising the amino acid sequence set forth in SEQ ID NO: 405.

[0467] In some embodiments, the antibody or antigen-binding fragment that binds to human TMPRSS4 is or is derived from TMPRSS4 Ab65. In some embodiments, the antibody or antigen-binding fragment that binds to TMPRSS4 comprises a VH comprising an HCDR1 comprising the amino acid sequence set forth in SEQ ID NO: 193, an HCDR2 comprising the amino acid sequence set forth in SEQ ID NO: 194, and an HCDR3 comprising the amino acid sequence set forth in SEQ ID NO: 411, and a VL comprising an LCDR1 comprising the amino acid sequence set forth in SEQ ID NO: 44, an LCDR2 comprising the amino acid sequence set forth in SEQ ID NO: 412, and an LCDR3 comprising the amino acid sequence set forth in SEQ ID NO: 413 and/or the antibody or antigen-binding fragment that binds to TMPRSS4 comprises a VH comprising an amino acid sequence at least 80%, at least 85%, at least 90%, at least 91%, at least 92%, at least 93%, at least 94%, at least 95%, at least 96%, at least 97%, at least 98%, at least 99%, at least 99.5% or 100% identical to the amino acid sequence set forth in SEQ ID NO: 409 and a VL comprising an amino acid sequence at least 80%, at least 85%, at least 90%, at least 91%, at least 92%, at least 93%, at least 94%, at least 95%, at least 96%, at least 97%, at least 98%, at least 99%, at least 99.5% or 100% identical to the amino acid sequence set forth in SEQ ID NO: 410. In some embodiments, to TMPRSS4 comprises a VH comprising the amino acid sequence set forth in SEQ ID NO: 409 and a VL comprising the amino acid sequence set forth in SEQ ID NO: 410.

[0468] In some embodiments, the antibody or antigen-binding fragment that binds to human TMPRSS4 is or is derived from TMPRSS4 Ab66. In some embodiments, the antibody or antigen-binding fragment that binds to TMPRSS4 comprises a VH comprising an HCDR1 comprising the amino acid sequence set forth in SEQ ID NO: 220, an HCDR2 comprising the amino acid sequence set forth in SEQ ID NO: 416, and an HCDR3 comprising the amino acid sequence set forth in SEQ ID NO: 417, and a VL comprising an LCDR1 comprising the amino acid sequence set forth in SEQ ID NO: 418, an LCDR2 comprising the amino acid sequence set forth in SEQ ID NO: 38, and an LCDR3 comprising the amino acid sequence set forth in SEQ ID NO: 419 and/or the antibody or antigen-binding fragment that binds to TMPRSS4 comprises a VH comprising an amino acid sequence at least 80%, at least 85%, at least 90%, at least 91%, at least 92%, at least 93%, at least 94%, at least 95%, at least 96%, at least 97%, at least 98%, at least 99%, at least 99.5% or 100% identical to the amino acid sequence set forth in SEQ ID NO: 414 and a VL comprising an amino acid sequence at least 80%, at least 85%, at least 90%, at least 91%, at least 92%, at least 93%, at least 94%, at least 95%, at least 96%, at least 97%, at least 98%, at least 99%, at least 99.5% or 100% identical to the amino acid sequence set forth in SEQ ID NO: 415. In some embodiments, to TMPRSS4 comprises a VH comprising the amino acid sequence set forth in SEQ ID NO: 414 and a VL comprising the amino acid sequence set forth in SEQ ID NO: 415.

[0469] In some embodiments, the antibody or antigen-binding fragment that binds to human TMPRSS4 is or is derived from TMPRSS4 Ab67. In some embodiments, the antibody or antigen-binding fragment that binds to TMPRSS4 comprises a VH comprising an HCDR1 comprising the amino acid sequence set forth in SEQ ID NO: 19, an HCDR2 comprising the amino acid sequence set forth in SEQ ID NO: 4, and an HCDR3 comprising the amino acid sequence set forth in SEQ ID NO: 422, and a VL comprising an LCDR1 comprising the amino acid sequence set forth in SEQ ID NO: 44, an LCDR2 comprising the amino acid sequence set forth in SEQ ID NO: 45, and an LCDR3 comprising the amino acid sequence set forth in SEQ ID NO: 423 and/or the antibody or antigen-binding fragment that binds to TMPRSS4 comprises a VH comprising an amino acid sequence at least 80%, at least 85%, at least 90%, at least 91%, at least 92%, at least 93%, at least 94%, at least 95%, at least 96%, at least 97%, at least 98%, at least 99%, at least 99.5% or 100% identical to the amino acid sequence set forth in SEQ ID NO: 420 and a VL comprising an amino acid sequence at least 80%, at least 85%, at least 90%, at least 91%, at least 92%, at least 93%, at least 94%, at least 95%, at least 96%, at least 97%, at least 98%, at least 99%, at least 99.5% or 100% identical to the amino acid sequence set forth in SEQ ID NO: 421. In some embodiments, to TMPRSS4 comprises a VH comprising the amino acid sequence set forth in SEQ ID NO: 420 and a VL comprising the amino acid sequence set forth in SEQ ID NO: 421.

[0470] In some embodiments, the antibody or antigen-binding fragment that binds to human TMPRSS4 is or is derived from TMPRSS4 Ab68. In some embodiments, the antibody or antigen-binding fragment that binds to TMPRSS4 comprises a VH comprising an HCDR1 comprising the amino acid sequence set forth in SEQ ID NO: 426, an HCDR2 comprising the amino acid sequence set forth in SEQ ID NO: 427, and an HCDR3 comprising the amino acid sequence set forth in SEQ ID NO: 428, and a VL comprising an LCDR1 comprising the amino acid sequence set forth in SEQ ID NO: 139, an LCDR2 comprising the amino acid sequence set forth in SEQ ID NO: 15, and an LCDR3 comprising the amino acid sequence set forth in SEQ ID NO: 429 and/or the antibody or antigen-binding fragment that binds to TMPRSS4 comprises a VH comprising an amino acid sequence at least 80%, at least 85%, at least 90%, at least 91%, least 99%, at least 99.5% or 100% identical to the amino acid sequence set forth in SEQ ID NO: 424 and a VL comprising an amino acid sequence at least 80%, at least 85%, at least 90%, at least 91%, at least 92%, at least 93%, at least 94%, at least 95%, at least 96%, at least 97%, at least 98%, at least 99%, at least 99.5% or 100% identical to the amino acid sequence set forth in SEQ ID NO: 425. In some embodiments, to TMPRSS4 comprises a VH comprising the amino acid sequence set forth in SEQ ID NO: 424 and a VL comprising the amino acid sequence set forth in SEQ ID NO: 425.

[0471] In some embodiments, the antibody or antigen-binding fragment that binds to human TMPRSS4 is or is derived from TMPRSS4 Ab69. In some embodiments, the antibody or antigen-binding fragment that binds to TMPRSS4 comprises a VH comprising an HCDR1 comprising the amino acid sequence set forth in SEQ ID NO: 432, an HCDR2 comprising the amino acid sequence set forth in SEQ ID NO: 433, and an HCDR3 comprising the amino acid sequence set forth in SEQ ID NO: 434, and a VL comprising an LCDR1 comprising the amino acid sequence set forth in SEQ ID NO: 238, an LCDR2 comprising the amino acid sequence set forth in SEQ ID NO: 435, and an LCDR3 comprising the amino acid sequence set forth in SEQ ID NO: 436 and/or the antibody or antigen-binding fragment that binds to TMPRSS4 comprises a VH comprising an amino acid sequence at least 80%, at least 85%, at least 90%, at least 91%, at least 92%, at least 93%, at least 94%, at least 95%, at least 96%, at least 97%, at least 98%, at least 99%, at least 99.5% or 100% identical to the amino acid sequence set forth in SEQ ID NO: 430 and a VL comprising an amino acid sequence at least 80%, at least 85%, at least 90%, at least 91%, at least 92%, at least 93%, at least 94%, at least 95%, at least 96%, at least 97%, at least 98%, at least 99%, at least 99.5% or 100% identical to the amino acid sequence set forth in SEQ ID NO: 431. In some embodiments, to TMPRSS4 comprises a VH comprising the amino acid sequence set forth in SEQ ID NO: 430 and a VL comprising the amino acid sequence set forth in SEQ ID NO: 431.

[0472] In some embodiments, the antibody or antigen-binding fragment that binds to human TMPRSS4 is or is derived from TMPRSS4 Ab70. In some embodiments, the antibody or antigen-binding fragment that binds to TMPRSS4 comprises a VH comprising an HCDR1 comprising the amino acid sequence set forth in SEQ ID NO: 439, an HCDR2 comprising the amino acid sequence set forth in SEQ ID NO: 440, and an HCDR3 comprising the amino acid sequence set forth in SEQ ID NO: 441, and a VL comprising an LCDR1 comprising the amino acid sequence set forth in SEQ ID NO: 442, an LCDR2 comprising the amino acid sequence set forth in SEQ ID NO: 443, and an LCDR3 comprising the amino acid sequence set forth in SEQ ID NO: 444 and/or the antibody or antigen-binding fragment that binds to TMPRSS4 comprises a VH comprising an amino acid sequence at least 80%, at least 85%, at least 90%, at least 91%, at least 92%, at least 93%, at least 94%, at least 95%, at least 96%, at least 97%, at least 98%, at least 99%, at least 99.5% or 100% identical to the amino acid sequence set forth in SEQ ID NO: 437 and a VL comprising an amino acid sequence at least 80%, at least 85%, at least 90%, at least 91%, at least 92%, at least 93%, at least 94%, at least 95%, at least 96%, at least 97%, at least 98%, at least 99%, at least 99.5% or 100% identical to the amino acid sequence set forth in SEQ ID NO: 438. In some embodiments, to TMPRSS4 comprises a VH comprising the amino acid sequence set forth in SEQ ID NO: 437 and a VL comprising the amino acid sequence set forth in SEQ ID NO: 438.

[0473] In some embodiments, the antibody or antigen-binding fragment that binds to human TMPRSS4 is or is derived from TMPRSS4 Ab71. In some embodiments, the antibody or antigen-binding fragment that binds to TMPRSS4 comprises a VH comprising an HCDR1 comprising the amino acid sequence set forth in SEQ ID NO: 447, an HCDR2 comprising the amino acid sequence set forth in SEQ ID NO: 448, and an HCDR3 comprising the amino acid sequence set forth in SEQ ID NO: 449, and a VL comprising an LCDR1 comprising the amino acid sequence set forth in SEQ ID NO: 450, an LCDR2 comprising the amino acid sequence set forth in SEQ ID NO: 15, and an LCDR3 comprising the amino acid sequence set forth in SEQ ID NO: 451 and/or the antibody or antigen-binding fragment that binds to TMPRSS4 comprises a VH comprising an amino acid sequence at least 80%, at least 85%, at least 90%, at least 91%, at least 92%, at least 93%, at least 94%, at least 95%, at least 96%, at least 97%, at least 98%, at least 99%, at least 99.5% or 100% identical to the amino acid sequence set forth in SEQ ID NO: 445 and a VL comprising an amino acid sequence at least 80%, at least 85%, at least 90%, at least 91%, at least 92%, at least 93%, at least 94%, at least 95%, at least 96%, at least 97%, at least 98%, at least 99%, at least 99.5% or 100% identical to the amino acid sequence set forth in SEQ ID NO: 446. In some embodiments, to TMPRSS4 comprises a VH comprising the amino acid sequence set forth in SEQ ID NO: 445 and a VL comprising the amino acid sequence set forth in SEQ ID NO: 446.

[0474] In some embodiments, the antibody or antigen-binding fragment that binds to human TMPRSS4 is or is derived from TMPRSS4 Ab72. In some embodiments, the antibody or antigen-binding fragment that binds to TMPRSS4 comprises a VH comprising an HCDR1 comprising the amino acid sequence set forth in SEQ ID NO: 454, an HCDR2 comprising the amino acid sequence set forth in SEQ ID NO: 455, and an HCDR3 comprising the amino acid sequence set forth in SEQ ID NO: 456, and a VL comprising an LCDR1 comprising the amino acid sequence set forth in SEQ ID NO: 457, an LCDR2 comprising the amino acid sequence set forth in SEQ ID NO: 15, and an LCDR3 comprising the amino acid sequence set forth in SEQ ID NO: 112 and/or the antibody or antigen-binding fragment that binds to TMPRSS4 comprises a VH comprising an amino acid sequence at least 80%, at least 85%, at least 90%, at least 91%, at least 92%, at least 93%, at least 94%, at least 95%, at least 96%, at least 97%, at least 98%, at least 99%, at least 99.5% or 100% identical to the amino acid sequence set forth in SEQ ID NO: 452 and a VL comprising an amino acid sequence at least 80%, at least 85%, at least 90%, at least 91%, at least 92%, at least 93%, at least 94%, at least 95%, at least 96%, at least 97%, at least 98%, at least 99%, at least 99.5% or 100% identical to the amino acid sequence set forth in SEQ ID NO: 453. In some embodiments, to TMPRSS4 comprises a VH comprising the amino acid sequence set forth in SEQ ID NO: 452 and a VL comprising the amino acid sequence set forth in SEQ ID NO: 453.

[0475] In some embodiments, the antibody or antigen-binding fragment that binds to human TMPRSS4 is or is derived from TMPRSS4 Ab73. In some embodiments, the antibody or antigen-binding fragment that binds to TMPRSS4 comprises a VH comprising an HCDR1 comprising the amino acid sequence set forth in SEQ ID NO: 180, an HCDR2 comprising the amino acid sequence set forth in SEQ ID NO: 460, and an HCDR3 comprising the amino acid sequence set forth in SEQ ID NO: 461, and a VL comprising an LCDR1 comprising the amino acid sequence set forth in SEQ ID NO: 462, an LCDR2 comprising the amino acid sequence set forth in SEQ ID NO: 463, and an LCDR3 comprising the amino acid sequence set forth in SEQ ID NO: 464 and/or the antibody or antigen-binding fragment that binds to TMPRSS4 comprises a VH comprising an amino acid sequence at least 80%, at least 85%, at least 90%, at least 91%, at least 92%, at least 93%, at least 94%, at least 95%, at least 96%, at least 97%, at least 98%, at least 99%, at least 99.5% or 100% identical to the amino acid sequence set forth in SEQ ID NO: 458 and a VL comprising an amino acid sequence at least 80%, at least 85%, at least 90%, at least 98%, at least 99%, at least 99.5% or 100% identical to the amino acid sequence set forth in SEQ ID NO: 459. In some embodiments, to TMPRSS4 comprises a VH comprising the amino acid sequence set forth in SEQ ID NO: 458 and a VL comprising the amino acid sequence set forth in SEQ ID NO: 459.

[0476] In some embodiments, the antibody or antigen-binding fragment that binds to human TMPRSS4 is or is derived from TMPRSS4 Ab74. In some embodiments, the antibody or antigen-binding fragment that binds to TMPRSS4 comprises a VH comprising an HCDR1 comprising the amino acid sequence set forth in SEQ ID NO: 180, an HCDR2 comprising the amino acid sequence set forth in SEQ ID NO: 467, and an HCDR3 comprising the amino acid sequence set forth in SEQ ID NO: 468, and a VL comprising an LCDR1 comprising the amino acid sequence set forth in SEQ ID NO: 469, an LCDR2 comprising the amino acid sequence set forth in SEQ ID NO: 470, and an LCDR3 comprising the amino acid sequence set forth in SEQ ID NO: 471 and/or the antibody or antigen-binding fragment that binds to TMPRSS4 comprises a VH comprising an amino acid sequence at least 80%, at least 85%, at least 90%, at least 91%, at least 92%, at least 93%, at least 94%, at least 95%, at least 96%, at least 97%, at least 98%, at least 99%, at least 99.5% or 100% identical to the amino acid sequence set forth in SEQ ID NO: 465 and a VL comprising an amino acid sequence at least 80%, at least 85%, at least 90%, at least 91%, at least 92%, at least 93%, at least 94%, at least 95%, at least 96%, at least 97%, at least 98%, at least 99%, at least 99.5% or 100% identical to the amino acid sequence set forth in SEQ ID NO: 466. In some embodiments, to TMPRSS4 comprises a VH comprising the amino acid sequence set forth in SEQ ID NO: 465 and a VL comprising the amino acid sequence set forth in SEQ ID NO: 466.

[0477] In some embodiments, the antibody or antigen-binding fragment that binds to human TMPRSS4 is or is derived from TMPRSS4 Ab75. In some embodiments, the antibody or antigen-binding fragment that binds to TMPRSS4 comprises a VH comprising an HCDR1 comprising the amino acid sequence set forth in SEQ ID NO: 474, an HCDR2 comprising the amino acid sequence set forth in SEQ ID NO: 475, and an HCDR3 comprising the amino acid sequence set forth in SEQ ID NO: 476, and a VL comprising an LCDR1 comprising the amino acid sequence set forth in SEQ ID NO: 477, an LCDR2 comprising the amino acid sequence set forth in SEQ ID NO: 478, and an LCDR3 comprising the amino acid sequence set forth in SEQ ID NO: 479 and/or the antibody or antigen-binding fragment that binds to TMPRSS4 comprises a VH comprising an amino acid sequence at least 80%, at least 85%, at least 90%, at least 91%, at least 92%, at least 93%, at least 94%, at least 95%, at least 96%, at least 97%, at least 98%, at least 99%, at least 99.5% or 100% identical to the amino acid sequence set forth in SEQ ID NO: 472 and a VL comprising an amino acid sequence at least 80%, at least 85%, at least 90%, at least 91%, at least 92%, at least 93%, at least 94%, at least 95%, at least 96%, at least 97%, at least 98%, at least 99%, at least 99.5% or 100% identical to the amino acid sequence set forth in SEQ ID NO: 473. In some embodiments, to TMPRSS4 comprises a VH comprising the amino acid sequence set forth in SEQ ID NO: 472 and a VL comprising the amino acid sequence set forth in SEQ ID NO: 473.

[0478] In some embodiments, the antibody or antigen-binding fragment that binds to human TMPRSS4 is or is derived from TMPRSS4 Ab76. In some embodiments, the antibody or antigen-binding fragment that binds to TMPRSS4 comprises a VH comprising an HCDR1 comprising the amino acid sequence set forth in SEQ ID NO: 474, an HCDR2 comprising the amino acid sequence set forth in SEQ ID NO: 482, and an HCDR3 comprising the amino acid sequence set forth in SEQ ID NO: 483, and a VL comprising an LCDR1 comprising the amino acid sequence set forth in SEQ ID NO: 44, an LCDR2 comprising the amino acid sequence set forth in SEQ ID NO: 484, and an LCDR3 comprising the amino acid sequence set forth in SEQ ID NO: 485 and/or the antibody or antigen-binding fragment that binds to TMPRSS4 comprises a VH comprising an amino acid sequence at least 80%, at least 85%, at least 90%, at least 91%, at least 92%, at least 93%, at least 94%, at least 95%, at least 96%, at least 97%, at least 98%, at least 99%, at least 99.5% or 100% identical to the amino acid sequence set forth in SEQ ID NO: 480 and a VL comprising an amino acid sequence at least 80%, at least 85%, at least 90%, at least 91%, at least 92%, at least 93%, at least 94%, at least 95%, at least 96%, at least 97%, at least 98%, at least 99%, at least 99.5% or 100% identical to the amino acid sequence set forth in SEQ ID NO: 481. In some embodiments, to TMPRSS4 comprises a VH comprising the amino acid sequence set forth in SEQ ID NO: 480 and a VL comprising the amino acid sequence set forth in SEQ ID NO: 481.

[0479] In some embodiments, the antibody or antigen-binding fragment that binds to human TMPRSS4 is or is derived from TMPRSS4 Ab77. In some embodiments, the antibody or antigen-binding fragment that binds to TMPRSS4 comprises a VH comprising an HCDR1 comprising the amino acid sequence set forth in SEQ ID NO: 488, an HCDR2 comprising the amino acid sequence set forth in SEQ ID NO: 489, and an HCDR3 comprising the amino acid sequence set forth in SEQ ID NO: 490, and a VL comprising an LCDR1 comprising the amino acid sequence set forth in SEQ ID NO: 44, an LCDR2 comprising the amino acid sequence set forth in SEQ ID NO: 45, and an LCDR3 comprising the amino acid sequence set forth in SEQ ID NO: 491 and/or the antibody or antigen-binding fragment that binds to TMPRSS4 comprises a VH comprising an amino acid sequence at least 80%, at least 85%, at least 90%, at least 91%, at least 92%, at least 93%, at least 94%, at least 95%, at least 96%, at least 97%, at least 98%, at least 99%, at least 99.5% or 100% identical to the amino acid sequence set forth in SEQ ID NO: 486 and a VL comprising an amino acid sequence at least 80%, at least 85%, at least 90%, at least 91%, at least 92%, at least 93%, at least 94%, at least 95%, at least 96%, at least 97%, at least 98%, at least 99%, at least 99.5% or 100% identical to the amino acid sequence set forth in SEQ ID NO: 487. In some embodiments, to TMPRSS4 comprises a VH comprising the amino acid sequence set forth in SEQ ID NO: 486 and a VL comprising the amino acid sequence set forth in SEQ ID NO: 487.

[0480] In some embodiments, the antibody or antigen-binding fragment that binds to human TMPRSS4 is or is derived from TMPRSS4 Ab78. In some embodiments, the antibody or antigen-binding fragment that binds to TMPRSS4 comprises a VH comprising an HCDR1 comprising the amino acid sequence set forth in SEQ ID NO: 494, an HCDR2 comprising the amino acid sequence set forth in SEQ ID NO: 495, and an HCDR3 comprising the amino acid sequence set forth in SEQ ID NO: 496, and a VL comprising an LCDR1 comprising the amino acid sequence set forth in SEQ ID NO: 497, an LCDR2 comprising the amino acid sequence set forth in SEQ ID NO: 15, and an LCDR3 comprising the amino acid sequence set forth in SEQ ID NO: 498 and/or the antibody or antigen-binding fragment that binds to TMPRSS4 comprises a VH comprising an amino acid sequence at least 80%, at least 85%, at least 90%, at least 91%, at least 92%, at least 93%, at least 94%, at least 95%, at least 96%, at least 97%, at least 98%, at least 99%, at least 99.5% or 100% identical to the amino acid sequence set forth in SEQ ID NO: 492 and a VL comprising an amino acid sequence at least 80%, at least 85%, at least 90%, at least 91%, at least 92%, at least 93%, at least 94%, at least 95%, at least 96%, at least 97%, at least 98%, at least 99%, at least 99.5% or 100% identical to the amino acid sequence set forth in SEQ ID NO: 493. In some embodiments, to TMPRSS4 comprises a VH comprising the amino acid sequence set forth in SEQ ID NO: 492 and a VL comprising the amino acid sequence set forth in SEQ ID NO: 493.

[0481] In some embodiments, the antibody or antigen-binding fragment that binds to human TMPRSS4 is or is derived from TMPRSS4 Ab79. In some embodiments, the antibody or antigen-binding fragment that binds to TMPRSS4 comprises a VH comprising an HCDR1 comprising the amino acid sequence set forth in SEQ ID NO: 501, an HCDR2 comprising the amino acid sequence set forth in SEQ ID NO: 502, and an HCDR3 comprising the amino acid sequence set forth in SEQ ID NO: 503, and a VL comprising an LCDR1 comprising the amino acid sequence set forth in SEQ ID NO: 324, an LCDR2 comprising the amino acid sequence set forth in SEQ ID NO: 15, and an LCDR3 comprising the amino acid sequence set forth in SEQ ID NO: 252 and/or the antibody or antigen-binding fragment that binds to TMPRSS4 comprises a VH comprising an amino acid sequence at least 80%, at least 85%, at least 90%, at least 91%, at least 92%, at least 93%, at least 94%, at least 95%, at least 96%, at least 97%, at least 98%, at least 99%, at least 99.5% or 100% identical to the amino acid sequence set forth in SEQ ID NO: 499 and a VL comprising an amino acid sequence at least 80%, at least 85%, at least 90%, at least 91%, at least 92%, at least 93%, at least 94%, at least 95%, at least 96%, at least 97%, at least 98%, at least 99%, at least 99.5% or 100% identical to the amino acid sequence set forth in SEQ ID NO: 500. In some embodiments, to TMPRSS4 comprises a VH comprising the amino acid sequence set forth in SEQ ID NO: 499 and a VL comprising the amino acid sequence set forth in SEQ ID NO: 500.

[0482] In various embodiments, the antigen-binding fragment that binds to TMPRSS4 comprises an scFv. In some embodiments, the scFv has the format VH-L-VL or VL-L-VH, wherein L is a linker peptide and the VH and VL are any VH and VL disclosed herein. In some embodiments, the scFv has the format VH-L-VL, wherein L is a linker peptide. In some embodiments, the scFv has the format VL-L-VH, wherein L is a linker peptide. In some embodiments, the linker peptide comprises the amino acid sequence of GGGGSGGGGSGGGGS (SEQ ID NO: 819). In some embodiments, the linker peptide comprises the amino acid sequence of GGGGSGSGGGGSGGGGS (SEQ ID NO: 820). Table 5 provides exemplary amino acid sequences of scFvs that bind to TMPRSS4. The linker peptide linking the VH to the VL is indicated in bold italic text.

TABLE 5
TMPRSS4 scFv Amino Acid Sequences

| Clone | scFv Sequence |
|---|---|
| TMPRSS4 | QVQLVQSGAEVKKPGSSVKVSCKASGYTFTDYYMHWVRQAPGQGLEWMGGIIPIFGTANYAQKFQGR |
| Ab1 scFv | VTITADESTSTAYMELSSLRSEDTAVYYCAKEGANGYWGQGTLVTVSSGGGGSGGGGSGGGGSDIQM |
| (VH-VL) | TQSPSSLSASVGDRVTITCQASQDISNYLNWYQQKPGKAPKLLIYKASSLESGVPSRFSGSGSGTDF |
| | TLTISSLQPEDFATYYCQQSSRIPPTFGQGTKVEIK (SEQ ID NO: 504) |
| TMPRSS4 | EVQLLESGGGLVQPGGSLRLSCAASGFTFSDYYMSWVRQAPGKGLEWVSYISGSGDAIYYADSVKGR |
| Ab2 scFv | FTISRDNSKNTLYLQMNSLRAEDTAVYYCARDRSDCGGDDRFLCDGYFDLWGRGTLVSLSGGGGSGG |
| (VH-VL) | GGSGGGGSDIQMTQSPSSLSASVGDRVTITCRASQSTNNYVNWYQQKPGKAPKLLIYAASSLQSGVP |
| | SRFSGSGSGTDFTLTISSLQPEDFATYYCQQSYSIPLTFGPGTKVDIK (SEQ ID NO: 505) |
| TMPRSS4 | QVQLVQSGAEVKKPGSSVKVSCKASGYTFTSYDINWVRQAPGQGLEWMGGIIPIFGTTKFAQKFQGR |
| Ab3 scFv | VTITADESTSTAYMELSSLRSEDTAVYYCARDWYSSSWYNGDRGDWFDPWGQGTLVTVSSGGGGSGG |
| (VH-VL) | GGSGGGGSDIVMTQSPLSLPVTPGEPASISCRSSGSLLHSNGYNYLDWYLQKPGQSPQLLIYAASSL |
| | QSGVPDRFSGSGSGTDFTLKISRVEAEDVGVYYCMQGTHWPGTFGQGTKVEIK (SEQ ID NO: 506) |
| TMPRSS4 | QVQLVQSGAEVKKPGASVKVSCKASGYFFTTYYLHWVRQAPGQGLEWMGVINPNSRLTSYAESFQGR |
| Ab4 scFv | VTMTRDTSTSTVYMELSSLRSEDTAVYYCEREMFPSSYGIDVWGQGTTVTVSSGGGGSGSGGGGSGG |
| (VH-VL) | GGSDIVMTQSPLSLPVTPGEPASISCRSSQSLLHSNGYNYLDWYLQKPGQSPQLLIYAASTLQSGVP |
| | DRFSGSGSGTDFTLKISRVEAEDVGVYYCMQGTHWPPTFGQGTKLEIK (SEQ ID NO: 507) |
| TMPRSS4 | QVQLVQSGAEVKKPGSSVKVSCKASGYTFTSYYMHWVRQAPGQGLEWMGRIIPILGATDYAQKFQGR |
| Ab5 scFv | VTITADESTSTAYMELSSLRSEDTAVYYCARAGYSSIAARPAFWGQGTLVTVSSGGGGSGSGGGGSG |
| (VH-VL) | GGGSEIVMTQSPATLSVSPGERATLSCRASQSVSSNLAWYQQKPGQAPRLLIYGASTRATGIPARFS |
| | GSGSGTEFTLTISSLQSEDFAVYYCQQYYSPFPLTFGGGTKVEIK (SEQ ID NO: 508) |
| TMPRSS4 | QVQLVQSGAEVKKPGASVKVSCKASGYTFTSYYMHWVRQAPGQGLEWLGIINPSDYTTSYAQKFQGR |
| Ab6 scFv | VTMTRDTSTSTVYMELSSLRSEDTAVYYCARVASSSWYPGDENWYFDLWGRGTLVTVSSGGGGSGSG |
| (VH-VL) | GGGSGGGGSDIVMTQSPDSLAVSLGERATINCKSSQSVLYSSNNKNYLAWYQQKPGQPPKLLIYWAS |
| | TRESGVPDRFSGSGSGTDFTLTISSLQAEDVAIYYCQQYYAIPWTFGQGTKVEIK (SEQ ID NO: |
| | 509) |
| TMPRSS4 | QVQLVQSGAEVKKPGASVKVSCKASGYTFSRYFMHWVRQAPGQGLEWVGWINPNSGNTGYAQKFQGR |
| Ab7 scFv | VTMTRDTSTSTVYMELSSLRSEDTAVYYCARVVTGGRLDVWGQGTTVTVSSGGGGSGGGGSGGGGSE |
| (VH-VL) | IVMTQSPATLSVSPGERATLSCRASQRVSNNYLAWYQQKPGQAPRLLIYGASTRASGIPARFSGSGS |
| | GTEFTLTISSLQSEDFAVYYCQQYGSTPYTFGQGTKVEIK (SEQ ID NO: 510) |
| TMPRSS4 | QVQLVQSGAEVKKPGASVKVSCKASGYRFTSQYMHWVRQAPGQGLEWMGIINPSGGSTSYAQKFQGR |
| Ab8 scFv | VTMTRDTSTSTVYMELSSLRSEDTAVYYCARGRIAVAGHPLGYWGQGTLVTVSSGGGGSGGGGSGGG |
| (VH-VL) | GSDIQMTQSPSSLSASVGDRVTITCRASQSISSWLAWYQQKPGKAPKLLIYGASSLQSGVPSRFSGS |
| | GSGTDFTLTISSLQPEDFATYYCQQANSFPPTFGGGTKVEIK (SEQ ID NO: 511) |
| TMPRSS4 | QVQLVQSGAEVKKPGASVKVSCKASGYTFTRYYMHWVRQAPGQGLEWMGWINPNSGGTNYAQKFQGR |
| Ab9 | VTMTRDTSTSTVYMELSSLRSEDTAVYYCARGGSWGSGPLGYWGQGTLVTVSSGGGGSGGGGSGGGG |
| | SDIQMTQSPSSLSASVGDRVTITCQASQDISRFLHWYQQKPGKAPKLLIYGASNLKSGVPSRFSGSG |
| | SGTDFTLTISSLQPEDFATYYCQQSYSTPPTFGGGTKVEIK (SEQ ID NO: 512) |
| TMPRSS4 | QVQLVQSGAEVKKPGASVKVSCKASGYTFTSYYMHWVRQAPGQGLEWMGIINPSGAGTTYGHNFQGR |
| Ab10 | VTMTRDTSTSTVYMELSSLRSEDTAVYYCARGPRDTAMVRFDYWGQGTLVTVSSGGGGSGGGGSGGG |
| | GSEIVMTQSPATLSVSPGERATLSCRASQSVSSYLAWYQQKPGQAPRLLIYGASTRATGIPARFSGS |
| | GSGTEFTLTISSLQSEDFAVYYCQQYGSSPGTFGQGTKLEIK (SEQ ID NO: 513) |
| TMPRSS4 | QVQLVQSGAEVKKPGASVKVSCKASGGTFSNYAISWVRQAPGQGLEWVGRINPNSGGTNYAQKFQGR |
| Ab11 scFv | VTMTRDTSTSTVYMELSSLRSEDTAVYYCARGRYSSSSWGQGTLVTVSSGGGGSGGGGSGGGGSDIQ |
| (VH-VL) | MTQSPSSLSASVGDRVTITCRASQSINNYLNWYQQKPGKAPKLLIYAASSLQSGVPSRFSGSGSGTD |
| | FTLTISSLQPEDFATYYCQQSYSTKWTFGQGTKVEIK (SEQ ID NO: 514) |
| TMPRSS4 | QVQLVQSGAEVKKPGASVKVSCKASGYTFSNYYIHWVRQAPGQGLEWMGWINPNSGDTNYAQKFQGR |
| Ab12 scFv | VTMTRDTSTSTVYMELSSLRSEDTAVYYCARGMTWRTSAATYWGQGTLVTVSSGGGGSGGGGSGGGG |
| (VH-VL) | SDIQMTQSPSSLSASVGDRVTITCRASQGISRWLAWYQQKPGKAPKLLIYGASNLQTGVPSRFSGSG |
| | SGTDFTLTISSLQPEDFATYYCQQSYSTPPTFGPGTKVDIK (SEQ ID NO: 515) |
| TMPRSS4 | QVQLVQSGAEVKKPGASVKVSCKASGYTFTNYYMHWVRQAPGQGLEWMGWISAYNGNTNYAQKLQGR |
| Ab13 scFv | VTMTRDTSTSTVYMELSSLRSEDTAVYYCATASGWGHSNSAGYWGQGTLVTVSSGGGGSGGGGSGGG |
| (VH-VL) | GSEIVMTQSPATLSVSPGERATLSCRASQSVNGNYLAWYQQKPGQAPRLLIYGVSSRASGIPARFSG |
| | SGSGTEFTLTISSLQSEDFAVYYCQQYGSSPYTFGQGTKVEIK (SEQ ID NO: 516) |
| TMPRSS4 | EVQLLESGGGLVQPGGSLRLSCAASGFTFSNHYMSWVRQAPGKGLEWVSAISGSGGSTYYADSVKGR |
| Ab14 scFv | FTISRDNSKNTLYLQMNSLRAGDTAVYYCARDRYRWGRGYFQHWGQGTLVTVSSGGGGSGGGGSGGG |
| (VH-VL) | GSDIQMTQSPSSLSASVGDRVTITCRASQRISTYLNWYQQKPGKAPKLLIYSASTLQAGVPSRFSGS |
| | GSGTDFTLTISSLQPEDFATYYCQQAYSLPWTFGQGTKLEIK (SEQ ID NO: 517) |
| TMPRSS4 | QVQLVQSGAEVKKPGASVKVSCKASGYTFTRYYMHWVRQAPGQGLEWMGWINPNSGVTNFAQKFQGR |
| Ab15 scFv | VTMTRDTSTSTVYMELSSLRSEDTAVYYCARVRIGWLQSPPLYWGQGTLVTVSSGGGGSGGGGSGGG |
| (VH-VL) | GSDIQMTQSPSSLSASVGDRVTITCRASQSINTWLAWYQQKPGKAPKLLIYAASSLQSGVPSRFSGS |
| | GSGTDFTLTISSLQPEDFATYYCQQAISFPLTFGGGTKVEIK (SEQ ID NO: 518) |
| TMPRSS4 | QVQLVQSGAEVKKPGASVKVSCKASGYTFSRHYMHWVRQAPGQGLEWMGRINPNSGGTNYAQKFQGR |
| Ab16 scFv | VTMTRDTSTSTVYMELSSLRSEDTAVYYCARSIYGDYWFDPWGQGTLVTVSSGGGGSGGGGSGGGGS |
| (VH-VL) | DIQMTQSPSSLSASVGDRVTITCRASQSINRWLAWYQQKPGKAPKLLIYGASNLQSGVPSRFSGSGS |
| | GTDFTLTISSLQPEDFATYYCQQANSFPYTFGQGTKLEIK (SEQ ID NO: 519) |
| TMPRSS4 | QVQLVQSGAEVKKPGASVKVSCKASGYTFTSYYIHWVRQAPGQGLEWMGWMSPNSGDTGYAQKFQGR |
| Ab17 scFv | VTMTRDTSTSTVYMELSSLRSEDTAVYYCARLVRGGFDYWGQGTLVTVSSGGGGSGGGGSGGGGSDI |
| (VH-VL) | QMTQSPSSLSASVGDRVTITCRASQGISSYLNWYQQKPGKAPKLLIYAASRLQSGVPSRFSGSGSGT |
| | DFTLTISSLQPEDFATYYCQQSYRSPPTFGQGTKLEIK (SEQ ID NO: 520) |
| TMPRSS4 | QVQLVQSGAEVKKPGASVKVSCKASGYTFTSSGINWVRQAPGQGLEWMGWINPNSGGAKYAQRFQGR |
| Ab18 scFv | VTMTRDTSTSTVYMELSSLRSEDTAVYYCARARGYSGSKRDFQHWGQGTLVTVSSGGGGSGGGGSGG |
| (VH-VL) | GGSDIVMTQSPDSLAVSLGERATINCKSSQSVLYSSNNKNYLAWYQQKPGQPPKLLIYWASTRESGV |
| | PDRFSGSGSGTDFTLTISSLQAEDVAVYHCQQYYNTPFTFGPGTKVDIK (SEQ ID NO: 521) |
| TMPRSS4 | QVQLVQSGAEVKKPGASVKVSCKASGYTFNRKFMHWVRQAPGQGLEWMGWMNPNNGATNYAQKFQGR |
| Ab19 scFv | VTMTRDTSTSTVYMELSSLRSEDTAVYYCARGRGYYGSGSYYGDYWGQGTLVTVSSGGGGSGGGGSG |
| (VH-VL) | GGGSDIQMTQSPSSLSASVGDRVTITCRASQSISRYLNWYQQKPGKAPKLLIYGASNLQSGVPSRFS |
| | GSGSGTDFTLTISSLQPEDFATYYCQQSYSTPPTFGPGTKVDIK (SEQ ID NO: 522) |
| TMPRSS4 | QVQLVQSGAEVKKPGASVKVSCKASGYTFTRYYMHWVRQAPGQGLEWMGWMNPNSGNAGYAQKLQGR |
| Ab20 scFv | VTMTRDTSTSTVYMELSSLRSEDTAVYYCARGYNWFDPWGQGTLVTVSSGGGGSGGGGSGGGGSDIQ |
| (VH-VL) | MTQSPSSLSASVGDRVTITCRASQNIATYLSWYQQKPGKAPKLLIYGASALRSGVPSRFSGSGSGTD |
| | FTLTISSLQPEDFATYYCLQHNTYPLTFGGGTKVEIK (SEQ ID NO: 523) |
| TMPRSS4 | QVQLVQSGAEVKKPGASVKVSCKASGYSFSGYYLHWVRQAPGQGLEWMGWMNPDSGNTGYAQNFQGR |
| Ab21 scFv | VTMTRDTSTSTVYMELSSLRSEDTAVYYCARLHRGGHDYWGQGTLVTVSSGGGGSGGGGSGGGGSDI |
| (VH-VL) | QMTQSPSSLSASVGDRVTITCRASQSISRYLNWYQQKPGKAPKLLIYAASTLQSGVPSRFSGSGSGT |
| | DFTLTISSLQPEDFATYYCQQSYSTPVTFGQGTRLEIK (SEQ ID NO: 524) |
| TMPRSS4 | QVQLVQSGAEVKKPGASVKVSCKASGYTFTSYYMHWVRQAPGQGLEWMGRINPHSGDADFVDKFQGR |
| Ab22 scFv | VTMTRDTSTSTVYMELSSLRSEDTAVYYCARDRRGYGGNSLDYWGQGTLVTVSSGGGGSGGGGSGGG |
| (VH-VL) | GSDIQMTQSPSSLSASVGDRVTITCRAGQNIKRYLNWYQQKPGKAPKLLIYAASSLQSGVPSRFSGS |
| | GSGTDFTLTISSLQPEDFATYYCQQSYSSPLTFGGGTKVEIK (SEQ ID NO: 525) |
| TMPRSS4 | QVQLVQSGAEVKKPGASVKVSCKASGYTFTRNYLHWVRQAPGQGLEWMGIINPSGGSTTYAQKFQGR |
| Ab23 scFv | VTMTRDTSTSTVYMELSSLRSEDTAVYYCARGRTWFRSGMDVWGQGTTVTVSSGGGGSGGGGSGGGG |
| (VH-VL) | SEIVMTQSPATLSVSPGERATLSCRASQSVGNYLAWYQQKPGQAPRLLIYGASTRATGIPARFSGSG |
| | SGTEFTLTISSLQSEDFAVYYCQQYHSSPPYTFGQGTKVEIK (SEQ ID NO: 526) |
| TMPRSS4 | QVQLVQSGAEVKKSGASVKVSCKASGYTFTSYYMHWVRQAPGQGLEWMGVINPSGGTTSYAQKFQGR |
| Ab24 scFv | VTMTRETSTSTVYMELSSLRSEDTAVYYCARGRGWLRSALGYWGQGTLVTVSSGGGGSGGGGSGGGG |
| (VH-VL) | SDIQMTQSPSSLSASVGDRVTITCRASQSISSWLAWYQQKPGKAPKLLIYAASTLQSGVPSRFSGSG |
| | SGTDFTLTISSLQPEDFATYYCQQSYNTPYTFGQGTKLEIK (SEQ ID NO: 527) |
| TMPRSS4 | QVQLVQSGAEVKKPGASVKVSCKASGGRFSTYALSWVRQAPGQGLEWMGWINPNSGGTNYAQKFQGR |
| Ab25 scFv | VTMTRDTSTSTVYMELSSLRSEDTAVYYCAKSLWWSPSHYYYYGMDVWGQGTTVTVSSGGGGSGGGG |
| (VH-VL) | SGGGGSEIVMTQSPATLSVSPGERATLSCRASQSVSSNYLAWYQQKPGQAPRLLIYGISTRASGIPA |
| | RFSGSGSGTEFTLTISSLQSEDFAVYYCQQRSNWPPSITFGQGTRLEIK (SEQ ID NO: 528) |
| TMPRSS4 | EVQLLESGGGLVQPGGSLRLSCAASGFTFSSYAMHWVRQAPGKGLEWVAVIWYDGSSKYYADSVKGR |
| Ab26 scFv | FTISRDNSKNTLYLQMNSLRAEDTAVYYCARGEVRRGFQHWGQGTLVTVSSGGGGSGGGGSGGGGSD |
| (VH-VL) | IQMTQSPSSLSASVGDRVTITCRASQNVGSWLAWYQQKPGKAPKLLIYAASSLQSGVPSRFSGSGSG |
| | TDFTLTIRSLQPEDFATYYCQQSYSTPITFGQGTRLEIK (SEQ ID NO: 529) |
| TMPRSS4 | QVQLVQSGAEVKKPGASVKVSCKASGYTFSRYYMHWVRQAPGQGLEWMGWMNPNSGDTGYAQKFQGR |
| Ab27 scFv | VTMTRDTSTSTVYMELSSLRSEDTAVYYCAKGREWLRSPFDYWGQGTLVTVSSGGGGSGGGGSGGGG |
| (VH-VL) | SDIQMTQSPSSLSASVGDRVTITCRASQSISTWLAWYQQKPGKAPKLLIYAASSLQSGVPSRFSGSG |
| | SGTDFTLTISSLQPEDFATYYCQQLSSYPLTFGQGTKVEIK (SEQ ID NO: 530) |
| TMPRSS4 | QVQLVQSGAEVKKPGASVKVSCKASGYTFTGYYMHWVRQAPGQGLEWMGWMNPNSGNTGYAQKFQGR |
| Ab28 scFv | VTMTRDTSTSTVYMELSSLRSEDTAVYYCARLRAKGGGFDYWGQGTLVTVSSGGGGSGGGGSGGGGS |
| (VH-VL) | DIQMTQSPSSLSASVGDRVTITCRASQGIGNYLAWYQQKPGKAPKLLIYAASSLESGVPSRFSGSGS |
| | GTDFTLTISSLQPEDFATYYCQQGYRFPPTFGPGTKVDIK (SEQ ID NO: 531) |
| TMPRSS4 | QVQLVQSGAEVKKPGASVKVSCKASGYTFANYNIHWVRQAPGQGLEWMGWMNPNSGNTGYAQKFQGR |
| Ab29 scFv | VTMTRDTSTSTVYMELSSLRSEDTAVYYCARPRYSSGWYGWYFDLWGRGTLVTVSSGGGGSGGGGSG |
| (VH-VL) | GGGSDIVMTQSPLSLPVTPGEPASISCRSSQSLLHSNGYNYLDWYLQKPGQSPQLLIYLGSNRASGV |
| | PDRFSGSGSGTDFTLKISRVEAEDVGVYYCMQSTYWPPTFGQGTKLEIK (SEQ ID NO: 532) |
| TMPRSS4 | QVQLVQSGAEVKKPGASVKVSCKASGYTFTTYYMHWVRQAPGQGLEWMGWMNPNSGNTGYAQKFQGR |
| Ab30 scFv | VTMTRDTSTSTVYMELSSLRSEDTAVYYCARARTWLLSPFDYWGQGTLVTVSSGGGGSGGGGSGGGG |
| (VH-VL) | SEIVMTQSPATLSVSPGERATLSCRASQSVGRYLAWYQQKPGQAPRLLIYGASTRATGIPARFSGSG |
| | SGTEFTLTISSLQSEDFAVYYCQHYDSSPMYTFGQGTKLEIK (SEQ ID NO: 533) |
| TMPRSS4 | QVQLVQSGAEVKKPGSSVKVSCKASGYTFRGSGISWVRQAPGQGLEWMGIIYPADSETRYSPSFQGR |
| Ab31 scFv | VTITADESTSTAYMELSSLRSEDTAVYYCARESSSWDYFDYWGQGTLVTVSSGGGGSGGGGSGGGGS |
| (VH-VL) | EIVMTQSPATLSVSPGERATLSCRASQSVRSYLAWYQQKPGQAPRLLIYGASTRATGIPARFSGSGS |
| | GTEFTLTISSLQSEDFAVYYCQQHGSLPLTFGQGTKVEIK (SEQ ID NO: 534) |
| TMPRSS4 | QVQLVQSGAEVKKPGSSVKVSCKASGGTFSSYAISWVRQAPGQGLEWMGRINPSGGSTSYAQKFQGR |
| Ab32 scFv | VTMTRDTSTSTVYMELSSLRSEDTAVYYCARGRYSSSSWGQGTLVTVSSGGGGSGGGGSGGGGSDIQ |
| (VH-VL) | MTQSPSSLSASVGDRVTITCRASQSISTYLNWYQQKPGKAPKLLIYAASSLQRGVPSRFSGSGSGTD |
| | FTLTISSLQPEDFATYYCQQSYTTPLTFGGGTKVEIK (SEQ ID NO: 535) |
| TMPRSS4 | QVQLVQSGAEVKKPGASVKVSCKASGYTFSNYYMHWVRQAPGQGLEWVGWMNPKSGNTGYAQKFQGR |
| Ab33 scFv | VTMTRDTSTSTVYMELSSLRSEDTAVYYCARGRTWIQSSLGYWGQGTLVTVSSGGGGSGGGGSGGGG |
| (VH-VL) | SDIQMTQSPSSLSASVGDRVTITCRASQYISRWLAWYQQKPGKAPKLLIYGSSTLQSGVPSRFSGSG |
| | SGTDFTLTISSLQPEDFATYYCQQYYSTPFTFGPGTKLEIK (SEQ ID NO: 536) |
| TMPRSS4 | QVQLVQSGAEVKKPGASVKVSCKASGYTFTGYYIHWVRQAPGQGLEWMGWMNPHSGNTGYAQKFQGR |
| Ab34 scFv | VTMTRDTSTSTVYMELSSLRSEDTAVYYCAREGGRYSSGRLGYWGQGTLVTVSSGGGGSGGGGSGGG |
| (VH-VL) | GSDIQMTQSPSSLSASVGDRVTITCRASQGISSWLAWYQQKPGKAPKLLIYAASTLQTGVPSRFSGS |
| | GSGTDFTLTISSLQPEDFATYYCQQSKSIPITFGGGTKVEIK (SEQ ID NO: 537) |
| TMPRSS4 | QVQLVQSGAEVKKPGASVKVSCKASGYTFTGYYMHWVRQAPGQGLEWMGKISAHSGETKYAQNVQGR |
| Ab35 scFv | VTMTRDTSTSTVYMELSSLRSEDTAVYYCARANYYGDYVNYYYGMDVWGQGTTVTVSSGGGGSGGGG |
| (VH-VL) | SGGGGSDIQMTQSPSSLSASVGDRVTITCQASQDISNYLNWYQQKPGKAPKLLIYKASSLESGVPSR |
| | FSGSGSGTDFTLTISSLQPEDFATYYCQQTYTIPITFGQGTRLEIK (SEQ ID NO: 538) |
| TMPRSS4 | EVQLLESGGGLVQPGGSLRLSCAASGFTFSSRAMSWVRQAPGKGLEWVSRINYDGSATTYADSVKGR |
| Ab36 scFv | FTISRDNSKNTLYLQMNSLRAEDTAVYYCARGITIFGVFDYWGQGTLVTVSSGGGGSGGGGSGGGGS |
| (VH-VL) | DIQMTQSPSSLSASVGDRVTITCRASQSISTWLAWYQQKPGKAPKLLIYRASNLQSGVPSRFSGSGS |
| | GTDFTLTISSLQPEDFATYYCQQSYSTPLTFGGGTKVEIK (SEQ ID NO: 539) |
| TMPRSS4 | EVQLLESGGGLVQPGGSLRLSCAASGFTFSSYAMHWVRQAPGKGLEWVSYISSSGSTVYYADSVKGR |
| Ab37 scFv | FTISRDNSKNTLYLQMNSLRAEDTAVYYCARVSNVTPRSGFGYWGQGTLVTVSSGGGGSGGGGSGGG |
| (VH-VL) | GSDIQMTQSPSSLSASVGDRVTITCRASQSISRYLNWYQQKPGKAPKLLIYSASTLQSGVPSRFSGS |
| | GSGTDFTLTISSLQPEDFATYYCQQAHSFPPSFGQGTKLEIK (SEQ ID NO: 540) |
| TMPRSS4 | QVQLAQSGAEVKKPGASVKVSCKASGYTFTRHYIQWVRQAPGQGLEWMGWINPNSGNTGYAQKFQGR |
| Ab38 scFv | VTMTRDTSTSTVYMELSSLRSEDTAVYYCARGRQWLRGEYFQHWGQGTLVTVSSGGGGSGGGGSGGG |
| (VH-VL) | GSDIQMTQSPSSLSASVGDRVTITCQASQDISRYLNWYQQKPGKAPKLLIYGASNLLSGVPSRFSGS |
| | GSGTDFTLTISSLQPEDFATYYCQQTHTTPYTFGQGTRLEIK (SEQ ID NO: 541) |
| TMPRSS4 | QVQLVQSGAEVKKPGASVKVSCKASGGSFSGYAVSWVRQAPGQGLEWLGVINPSDSWTAFAQKFQGR |
| Ab39 scFv | VTMTRDTSTSTVYMELSSLRSEDTAVYYCAREREDDAFDIWGQGTTVTVSSGGGGSGGGGSGGGGSD |
| (VH-VL) | IQMTQSPSSLSASVGDRVTITCRASQGIRNWLAWYQQKPGKAPKLLIYRASTLQSGVPSRFSGSGSG |
| | TDFTLTISSLQPEDFATYYCQQSYTTPFTFGQGTKLEIK (SEQ ID NO: 542) |
| TMPRSS4 | QVQLVQSGAEVKKPGASVKVSCKASGGTFSSYAISWVRQAPGQGLEWMGIINPRGGSTNYAQKFQGR |
| Ab40 scFv | VTMTRDTSTSTVYMELSSLRSEDTAVYYCAREGSSWYYDAFDIWGQGTMVTVSSGGGGSGGGGSGGG |
| (VH-VL) | GSDIQMTQSPSSLSASVGDRVTITCRASQSISSYLNWYQQKPGKAPKLLIYAAYNLQSGVPSRFSGS |
| | GSGTDFTLTISSLQPEDFATYYCQQSYSIPFTFGGGTKVEIK (SEQ ID NO: 543) |
| TMPRSS4 | QVQLVQSGAEVKKPGASVKVSCKASGGTFSSYAISWVRQAPGQGLEWMGWMNPNSGDTHYAQKFQGR |
| Ab41 scFv | VTMTRDTSTSTVYMELSSLRSEDTAVYYCAREGSSWYYDAFDIWGQGTLVTVSSGGGGSGGGGSGGG |
| (VH-VL) | GSDIQMTQSPSSLSASVGDRVTITCRASQSISRWLAWYQQKPGKAPKLLIYAASTLQTGVPSRFSGS |
| | GSGTDFTLTISSLQPEDFATYYCLQHSSYPFTFGQGTKVEIK (SEQ ID NO: 544) |
| TMPRSS4 | QVQLVQSGAEVKKPGASVKVSCKASGYSFTSHYMHWVRQAPGQGLEWMGWMNPNSGNTGYAQKFQGR |
| Ab42 scFv | VTMTRDTSTSTVYMELSSLRSEDTAVYYCARLGQQLDYWGQGTLVTVSSGGGGSGGGGSGGGGSDIQ |
| (VH-VL) | MTQSPSSLSASVGDRVTITCRASQSIRNYLNWYQQKPGKAPKLLIYEASRLQSGVPSRFSGSGSGTD |
| | FTLTISSLQPEDFATYYCQQSYSAPPTFGPGTKVDIK (SEQ ID NO: 545) |
| TMPRSS4 | QVQLVQSGAEVKKPGASVKVSCKASGYTFIGYYMHWVRQAPGQGLEWMGRINPNSGETNYAQKFQGR |
| Ab43 scFv | VTMTRDTSTSTVYMELSSLRSEDTAVYYCARVRVRGVIHPGFDPWGQGTLVTVSSGGGGSGGGGSGG |
| (VH-VL) | GGSDIQMTQSPSSLSASVGDRVTITCQASQDISNYLNWYQQKPGKAPKLLIYAASSLQSGVPSRFSG |
| | SGSGTDFTLTISSLQPEDFATYYCQQSYSTPVTFGPGTKVDIK (SEQ ID NO: 546) |
| TMPRSS4 | QVQLVQSGAEVKKPGASVKVSCKASGYTFRNYYIHWVRQAPGQGLEWMGRINPNSGGTNYAQKFQGR |
| Ab44 scFv | VTMTRDTSTSTVYMELSSLRSEDTAVYYCARARIAVAVSGFGYWGQGTLVTVSSGGGGSGGGGSGGG |
| (VH-VL) | GSDIQMTQSPSSLSASVGDRVTITCQASQDISNYLNWYQQKPGKAPKLLIYAASSLHSGVPSRFSGS |
| | GSGTDFTLTISSLQPEDFATYYCQESSSFPYTFGPGTKVDIK (SEQ ID NO: 547) |
| TMPRSS4 | QVQLVQSGAEVKKPGASVKVSCKASGYTFSRWYMHWVRQAPGQGLEWMGRINPNSGGTNYAQKFQGR |
| Ab45 scFv | VTMTRDTSTSTVYMELSSLRSEDTAVYYCARVGGYGWFDPWGQGTLVTVSSGGGGSGGGGSGGGGSD |
| (VH-VL) | IQMTQSPSSLSASVGDRVTITCQATQDIRNYLNWYQQKPGKAPKLLIYATSSLQSGVPSRFSGSGSG |
| | TDFTLTISSLQPEDFATYYCQQSYSPPYTFGQGTKLEIK (SEQ ID NO: 548) |
| TMPRSS4 | QVQLVQSGAEVKKPGASVKVSCKASGYTFSRYFMHWVRQAPGQGLEWMGWINPNSGGTNYAQKFQGR |
| Ab46 scFv | VTMTRDTSTSTVYMELSSLRSEDTAVYYCARVRIGWLQSPPLYWGQGTLVTVSSGGGGSGGGGSGGG |
| (VH-VL) | GSDIQMTQSPSSLSASVGDRVTITCRASQSISTWLAWYQQKPGKAPKLLIYAASSLQSGVPSRFSGS |
| | GSGTDFTLTISSLQPEDFATYYCQQSYGFPWTFGQGTKVEIK (SEQ ID NO: 549) |
| TMPRSS4 | QVQLVQSGAEVKKPGASVKVSCKASGYTFTGYFMHWVRQAPGQGLEWMGWMNPNSGNTGYAQKFQGR |
| Ab47 scFv | VTMTRDTSTSTVYMELSSLRSEDTAVYYCVRGRTWIQSSLGYWGQGTLVTVSSGGGGSGGGGSGGGG |
| (VH-VL) | SDIQMTQSPSSLSASVGDRVTITCRASQSISSYLNWYQQKPGKAPKLLIYAASSLQSGVPSRFSGSG |
| | SGTDFTLTISSLQPEDFATYYCQQSYSTPLTFGGGTKVEIK (SEQ ID NO: 550) |
| TMPRSS4 | QVQLVQSGAEVKKPGASVKVSCKASGYTFTGYYLHWVRQAPGQGLEWMGWISAYNGNTNYAQNLQGR |
| Ab48 scFv | VTMTRDTSTSTVYMELSSLRSEDTAVYYCARHSYSGSYSTLPYYGMDVWGQGTTVTVSSGGGGSGGG |
| (VH-VL) | GSGGGGSDIQMTQSPSSLSASVGDRVTITCRASQGISNYLAWYQQKPGKAPKLLIYTASTLFPGVPS |
| | RFSGSGSGTDFTLTISSLQPEDFATYYCQQSYSIPLTFGGGTKVEIK (SEQ ID NO: 551) |
| TMPRSS4 | QVQLVQSGAEVKKPGASVKVSCKASGYTFTGYYMHWVRQAPGQGLEWMGRINPNSGGTNYAQKFQGR |
| Ab49 scFv | VTMTRDTSTSTVYMELSSLRSEDTAVYYCARERAGYSSGQFDYWGQGTLVTVSSGGGGSGGGGSGGG |
| (VH-VL) | GSDIQMTQSPSSLSASVGDRVTITCRASQSISNWLAWYQQKPGKAPKLLIYAASTLQNGVPSRFSGS |
| | GSGTDFTLTISSLQPEDFATYYCQQSYTFPITFGQGTKVEIK (SEQ ID NO: 552) |
| TMPRSS4 | QVQLVQSGAEVKKPGASVKVSCKASGYTFTGYYMHWVRQAPGQGLEWMGWINPNSGGTHYAQKFQGR |
| Ab50 scFv | VTMTRDTSTSTVYMELSSLRSEDTAVYYCARVRIGWLQSPPLYWGQGTLVTVSSGGGGSGGGGSGGG |
| (VH-VL) | GSDIQMTQSPSSLSASVGDRVTITCRASQGISNYLAWYQQKPGKAPKLLIYATSRLQSGVPSRFSGS |
| | GSGTDFTLTISSLQPEDFATYYCQQSYKTPLTFGGGTKVEIK (SEQ ID NO: 553) |
| TMPRSS4 | QVQLVQSGAEVKKPGASVKVSCKASGYTFTNYYMHWVRQAPGQGLEWMGWINPKSGGTSYAQKFQGR |
| Ab51 scFv | VTMTRDTSTSTVYMELSSLRSEDTAVYYCASGKQWLVGGRFDYWGQGTLVTVSSGGGGSGGGGSGGG |
| (VH-VL) | GSDIQMTQSPSSLSASVGDRVTITCRASQSISSYLNWYQQKPGKAPKLLIYAASSLQSGVPSRFSGS |
| | GSGTDFTLTISSLQPEDFATYYCQQSYSTPLTFGGGTKVEIK (SEQ ID NO: 554) |
| TMPRSS4 | QVQLVQSGAEVKKPGASVKVSCKASGYTFTRYYIHWVRQAPGQGLEWMGWMNPNSGNTGFAQKLQGR |
| Ab52 scFv | VTMTRDTSTSTVYMELSSLRSEDTAVYYCARGPFPRGRLDLWGQGTLVTVSSGGGGSGGGGSGGGGS |
| (VH-VL) | DIQMTQSPSSLSASVGDRVTITCRASQGISRWLGWYQQKPGKAPKLLIYGASNLQTGVPSRFSGSGS |
| | GTDFTLTISSLQPEDFATYYCQQSYSSPRTFGQGTKVEIK (SEQ ID NO: 555) |
| TMPRSS4 | QVQLVQSGAEVKKPGASVKVSCKASGYTFTRYYMHWVRQAPGQGLEWMGIINPTGGSTSYAQKFQGR |
| Ab53 scFv | VTMTRDTSTSTVYMELSSLRSEDTAVYYCARGRTWIQSSLGYWGQGTLVTVSSGGGGSGGGGSGGGG |
| (VH-VL) | SDIQMTQSPSSLSASVGDRVTITCRASRSINRWLAWYQQKPGKAPKLLIYGASTLQSGVPSRFSGSG |
| | SGTDFTLTISSLQPEDFATYYCQQSYSTPTFGGGTKVEIK (SEQ ID NO: 556) |
| TMPRSS4 | QVQLVQSGAEVKKPGASVKVSCKASGYTFTSYYMQWVRQAPGQGLEWMGWMNPNSGNTGYAQKFQGR |
| Ab54 scFv | VTMTRDTSTSTVYMELSSLRSEDTAVYYCARVRIGWLQSPPLYWGQGTLVTVSSGGGGSGGGGSGGG |
| (VH-VL) | GSDIQMTQSPSSLSASVGDRVTITCRASQGISNYLAWYQQKPGKAPKLLIYAASSLQSGVPSRFSGS |
| | GSGTDFTLTISSLQPEDFATYYCQQSYSIPFTFGPGTKVDIK (SEQ ID NO: 557) |
| TMPRSS4 | QVQLVQSGAEVKKPGASVKVSCKASGYTFTTYYMHWVRQAPGQGLEWMGIINPSGGSTSYAQKFQGR |
| Ab55 scFv | VTMTRDTSTSTVYMELSSLRSEDTAVYYCARGRSWYRSNVDYWGQGTLVTVSSGGGGSGGGGSGGGG |
| (VH-VL) | SDIQMTQSPSSLSASVGDRVTITCRASQSISSWLAWYQQKPGKAPKLLIYAASSLQSGVPSRFSGSG |
| | SGTDFTLTISSLQPEDFATYYCQQSYSTPRTFGQGTRLEIK (SEQ ID NO: 558) |
| TMPRSS4 | QVQLVQSGAEVKKPGASVKVSCKASGHTFTRYYMHWVRQAPGQGLEWMGWINPNSGNTGDAQKFQGR |
| Ab56 scFv | VTMTRDTSTSTVYMELSSLRSEDTAVYYCARDRGIVVVPAAIGGMDVWGQGTMVTVSSGGGGSGGGG |
| (VH-VL) | SGGGGSDIVMTQSPLSLPVTPGEPASISCRSSQSLLHSNGYNYLDWYLQKPGQSPQLLIYLGSNRAS |
| | GVPDRFSGSGSGTDFTLKISRVEAEDVGVYYCMQALQTPITFGQGTRLEIK (SEQ ID NO: 559) |
| TMPRSS4 | QVQLVQSGAEVKKPGASVKVSCKASGYTFTGYFMHWVRQAPGQGLEWMGRINPNSGGTNYAQKFQGR |
| Ab57 scFv | VTMTRDTSTSTVYMELSSLRSEDTAVYYCARGKGRYFDLWGRGTLVTVSSGGGGSGGGGSGGGGSDI |
| (VH-VL) | VMTQSPLSLPVTPGEPASISCRSSQSLLHSNGYNYLDWYLQKPGQSPQLLIYLGSNRASGVPDRFSG |
| | SGSGTDFTLKISRVEAEDVGVYYCMQGTHWPITFGQGTRLEIK (SEQ ID NO: 560) |
| TMPRSS4 | QVQLVQSGAEVKKPGASVKVSCKASGYTFTRYYLHWVRQAPGQGLEWMGWVSAYNGNTNYAQKFQGR |
| Ab58 scFv | VTMTRDTSTSTVYMELSSLRSEDTAVYYCARGYCSGGSCYWFDPWGQGTLVTVSSGGGGSGGGGSGG |
| (VH-VL) | GGSDIVMTQSPLSLPVTPGEPASISCRSSQSLLHSNGYNYLDWYLQKPGQSPQLLIYLGSNRASGVP |
| | DRFSGSGSGTDFTLKISRVEAEDVGVYYCMQALQTPLTFGQGTKVEIK (SEQ ID NO: 561) |
| TMPRSS4 | QVQLVQSGAEVKKPGASVKVSCKASGGTFSSYTLSWVRQAPGQGLEWMGWIHPKSGVTKNAQKFQGR |
| Ab59 scFv | VTMTRDTSTSTVYMELSSLRSEDTAVYYCARGWVYGRMDAWGQGTTVTVSSGGGGSGGGGSGGGGSE |
| (VH-VL) | IVMTQSPATLSVSPGERATLSCRASQSVSSNYLAWYQQKPGQAPRLLIYGASTRATGIPARFSGSGS |
| | GTEFTLTISSLQSEDFAVYYCQQYGTLPYTFGQGTKVEIK (SEQ ID NO: 562) |
| TMPRSS4 | QVQLVQSGAEVKKPGASVKVSCKASGYSFTTYYIHWVRQAPGQGLEWMGIINPSGGSTSYAQKFQGR |
| Ab60 scFv | VTMTRDTSTSTVYMELSSLRSEDTAVYYCARGGYYGSGYNSVGYWGPGTLVTVSSGGGGSGGGGSGG |
| (VH-VL) | GGSEIVMTQSPATLSVSPGERATLSCRASQSVSSNTLAWYQQKPGQAPRLLIYGASTRATGIPARFS |
| | GSGSGTEFTLTISSLQSEDFAVYYCQQYGSSPLTFGPGTKVDIK (SEQ ID NO: 563) |
| TMPRSS4 | QVQLVQSGAEVKKPGASVKVSCKASGYTFTNYYMHWVRQAPGQGLEWMGWMNPNSGNTGYAQNLQGR |
| Ab61 scFv | VTMTRDTSTSTVYMELSSLRSEDTAVYYCARGRTWFRSGMDVWGQGTTVTVSSGGGGSGGGGSGGGG |
| (VH-VL) | SEIVMTQSPATLSVSPGERATLSCRASQSVSSYLAWYQQKPGQAPRLLIYGASTRATGIPARFSGSG |
| | SGTEFTLTISSLQSEDFAVYYCQQYDISVTFGPGTKVDIK (SEQ ID NO: 564) |
| TMPRSS4 | QVQLVQSGAEVKKPGASVKVSCKASGYTFTDYYIHWVRQAPGQGLEWMGWISTYNGNTNYAQKLQGR |
| Ab62 scFv | VTMTRDTSTSTVYMELSSLRSEDTAVYYCARGMVRGMDVWGQGTMVTVSSGGGGSGGGGSGGGGSDI |
| (VH-VL) | VMTQSPDSLAVSLGERATINCKSSQSVLYSSNNKNYLAWYQQKPGQPPKLLIYWASTRESGVPDRFS |
| | GSGSGTDFTLTISSLQAEDVAVYYCQQYYTTPWTFGQGTRLEIK (SEQ ID NO: 565) |
| TMPRSS4 | QVQLVQSGAEVKKPGASVKVSCKASGYTFTGYRMHWVRQAPGQGLEWMGVINPNTGTARFAQKFQGR |
| Ab63 scFv | VTMTRDTSTSTVYMELSSLRSEDTAVYYCASVGVYWYFDLWGRGTLVTVSSGGGGSGGGGSGGGGSD |
| (VH-VL) | IVMTQSPDSLAVSLGERATINCKSSQSVLYSSNNKNYLAWYQQKPGQPPKLLIYWASTRESGVPDRF |
| | SGSGSGTDFTLTISSLQAEDVAVYYCQQYYSAPLTFGGGTKVEIK (SEQ ID NO: 566) |
| TMPRSS4 | QVQLVQSGAEVKKPGASVKVSCKASGYTFTGYYMHWVRQAPGQGLEWMGMINPSGGGTTYAQKFQGR |
| Ab64 scFv | VTMTRDTSTSTVYMELSSLRSEDTAVYYCARDRRSMITFRTDYWGQGTLVTVSSGGGGSGGGGSGGG |
| (VH-VL) | GSDIVMTQSPDSLAVSLGERATINCKSSQSVLYSSNNKNYLAWYQQKPGQPPKLLIYWASTRESGVP |
| | DRFSGSGSGTDFTLTISSLQAEDVAVYYCQQYYSTPYTFGQGTKLEIK (SEQ ID NO: 567) |
| TMPRSS4 | QVQLVQSGAEVKKPGASVKVSCKASGYTFTGYYMHWVRQAPGQGLEWMGWMNPNSGNTGYAQKFQGR |
| Ab65 scFv | VTMTRDTSTSTVYMELSSLRSEDTAVYYCAGRKWLGLDFYNWEDPWGQGTLVTVSSGGGGSGGGGSG |
| (VH-VL) | GGGSDIVMTQSPDSLAVSLGERATINCKSSQSVLYSSNNKNYLAWYQQKPGQPPKLLIYWASTRQSG |
| | VPDRFSGSGSGTDFTLTISSLQAEDVAVYYCQQYYSTPWTFGQGTKVEIK (SEQ ID NO: 568) |
| TMPRSS4 | QVQLVQSGAEVKKPGSSVKVSCKASGGTFSSYAISWVRQAPGQGLEWVGGIMPIFGTANYAQKFQGR |
| Ab66 scFv | VTITADESPSTAYMELSSLRSEDTAVYYCATGRRELLNWGQGTLVTVSSGGGGSGGGGSGGGGSEIV |
| (VH-VL) | MTQSPATLSVSPGERATLSCRASQSVNSRFLAWYQQKPGQAPRLLIYGASTRATGIPARFSGSGSGT |
| | EFTLTISSLQSEDFAVYYCMQGTHWPYTFGQGTKVEIK (SEQ ID NO: 569) |
| TMPRSS4 | QVQLVQSGAEVKKPGSSVKVSCKASGYTFTSYDINWVRQAPGQGLEWMGGIIPIFGTANYAQKFQGR |
| Ab67 scFv | VTITADESTSTAYMELSSLRSEDTAVYYCATTPGDAFDIWGQGTMVTVSSGGGGSGGGGSGGGGSDI |
| (VH-VL) | VMTQSPDSLAVSLGERATINCKSSQSVLYSSNNKNYLAWYQQKPGQPPKLLIYWASTRESGVPDRFS |
| | GSGSGTDFTLTISSLQAEDVAVYYCQQYSDTPLTFGQGTKVEIK (SEQ ID NO: 570) |
| TMPRSS4 | EVQLLESGGGLVKPGGSLRLSCAASGFTFSSSWMHWVRQAPGKGLEWVSAIGTAGDTYYPGSVKGRF |
| Ab68 scFv | TISRDDSKNTLYLQMNSLKTEDTAVYYCARVRLGHFDLWGRGTLVTVSSGGGGSGGGGSGGGGSDIQ |
| (VH-VL) | MTQSPSSLSASVGDRVTITCRASQSISRYLNWYQQKPGKAPKLLIYAASSLQSGVPSRFSGSGSGTD |
| | FTLTISSLQPEDFATYYCQQSYSNPPTFGQGTKLEIK (SEQ ID NO: 571) |
| TMPRSS4 | EVQLLESGGGLVQHGGSLRLSCAASGFAFSSYVLHWVRQAPGKGLEWVSSISSSSSYIYYADSVKGR |
| Ab69 scFv | FTISRDNSKNTLYLQMNSLRAEDTAVYYCARGDRYPGLPNYWGQGTLVTVSSGGGGSGGGGSGGGGS |
| (VH-VL) | DIQMTQSPSSLSASVGDRVTITCRASQGISSWLAWYQQKPGKAPKLLIYQASNKDTGVPSRFSGSGS |
| | GTDFTLTISSLQPEDFATYYCQQSYRIPWTFGQGTKVEIK (SEQ ID NO: 572) |
| TMPRSS4 | EVQLLESGGGLVQPGGSLRLSCAASGFAFSGTWMQWVRQAPGKGLEWVSDISGSSRDTNYADSVKGR |
| Ab70 scFv | FTISRDNSKNTLYLQMNSLRAEDTAVYYCAKDHWDSYGYLDYWGQGTLVTVSSGGGGSGGGGSGGGG |
| (VH-VL) | SDIQMTQSPSSLSASVGDRVTITCRASQSISGWLAWYQQKPGKAPKLLIYAASTLRDGVPSRFSGSG |
| | SGTDFTLTISSLQPEDFATYYCQQANSFPLTFGQGTKVEIK (SEQ ID NO: 573) |
| TMPRSS4 | EVQLLESGGGLVQPGGSLRLSCAASGFMFDYYAMHWVRQAPGKGLEWVSLISYDGRNKYYADSVKGR |
| Ab71 scFv | FTISRDNSKNTLYLQMNSLRAEDTAVYYCARPGSYSRFQHWGQGTLVTVSSGGGGSGGGGSGGGGSD |
| (VH-VL) | IQMTQSPSSLSASVGDRVTITCRASQGISNNLNWYQQKPGKAPKLLIYAASSLQSGVPSRFSGSGSG |
| | TDFTLTISSLQPEDFATYYCQQANNFPITFGQGTKVEIK (SEQ ID NO: 574) |
| TMPRSS4 | EVQLLESGGGLVQPGGSLRLSCAASGFTFGAYVMHWVRQAPGKGLEWVSSISGGSTYYADSVKGRFT |
| Ab72 scFv | ISRDNSKNTLYLQMNSLRAEDTAVYYCARHPVRGVIGAGWFDPWGQGTLVTVSSGGGGSGGGGSGGG |
| (VH-VL) | GSDIQMTQSPSSLSASVGDRVTITCRASQNISRWLAWYQQKPGKAPKLLIYAASSLQSGVPSRFSGS |
| | GSGTDFTLTISSLQPEDFATYYCQQAISFPLTFGGGTKVEIK (SEQ ID NO: 575) |
| TMPRSS4 | EVQLLESGGGLVQPGGSLRLSCAASGFTFSSYAMHWVRQAPGKGLEWLAVISEDGSIRHYADSVKGR |
| Ab73 scFv | FTISRDNSKNTLYLQMNSLRAEDTAVYYCAKPKASSGPRLIDYWGQGTLVTVSSGGGGSGGGGSGGG |
| (VH-VL) | GSDIQMTQSPSSLSASVGDRVTITCRASQGISNSLAWYQQKPGKAPKLLIYSAVNLQSGVPSRFSGS |
| | GSGTDFTLTISSLQPEDFATYYCQQANSFPLTFGGGTKVEIK (SEQ ID NO: 576) |
| TMPRSS4 | EVQLLESGGGLVQPGGSLRLSCAASGFTFSSYAMHWVRQAPGKGLEWVSSISSSSTYIHYADSVKGR |
| Ab74 scFv | FTISRDNSKNTLYLQMNSLRAEDTAVYYCARVGRYYGSGSSLVDYWGQGTLVTVSSGGGGSGGGGSG |
| (VH-VL) | GGGSDIQMTQSPSSLSASVGDRVTITCRASQSVSSWLAWYQQKPGKAPKLLIYDASSLQSGVPSRFS |
| | GSGSGTDFTLTISSLQPEDFATYYCQQAKSFPPTFGQGTKVEIK (SEQ ID NO: 577) |
| TMPRSS4 | EVQLLESGGGLVQPGGSLRLSCAASGFTFSSYAMSWVRQAPGKGLEWVSSISSASSYKYYADSVKGR |
| Ab75 scFv | FTISRDNSKNTLYLQMNSLRAEDTAVYYCARDIYSSGWRGYYYYGMDVWGQGTTVTVSSGGGGSGGG |
| (VH-VL) | GSGGGGSDIQMTQSPSSLSASVGDRVTITCRASQGIRNDLNWYQQKPGKAPKLLIYAATRLQSGVPS |
| | RFSGSGSGTDFTLTISSLQPEDFATYYCQQAHSFPYSFGQGTRLEIK (SEQ ID NO: 578) |
| TMPRSS4 | EVQLLESGGGLVQPGGSLRLSCAASGFTFSSYAMSWVRQAPGKGLEWVSAISGSGGNAYYADSVKGR |
| Ab76 scFv | FTISRDNAKNSLYLQMNSLRAEDTAVYYCAKNSWGSYRPRAFDIWGQGTMVTVSSGGGGSGGGGSGG |
| (VH-VL) | GGSDIVMTQSPDSLAVSLGERATINCKSSQSVLYSSNNKNYLAWYQQKPGQPPKLLIYWASTRASGV |
| | PDRFSGSGSGTDFTLTISSLQAEDVAVYYCQQYLSLPYTFGQGTKVEIK (SEQ ID NO: 579) |
| TMPRSS4 | QVQLVQSGAEVKKPGASVKVSCKASGNIFTAQYMHWVRQAPGQGLEWMGWMNPNTVYTGSAQKFQGR |
| Ab77 scFv | VTMTRDTSTSTVYMELSSLRSEDTAVYYCARDWVGDGYNSFDYWGQGTLVTVSSGGGGSGGGGSGGG |
| (VH-VL) | GSDIVMTQSPDSLAVSLGERATINCKSSQSVLYSSNNKNYLAWYQQKPGQPPKLLIYWASTRESGVP |
| | DRFSGSGSGTDFTLTISSLQAEDVAVYYCQQYYTTPFTFGPGTKVDIK (SEQ ID NO: 580) |
| TMPRSS4 | EVQLLESGGGLVQPGGSLRLSCAASGFTFSSYGMNWVRQAPGKGLEWVSAISGSGGRTYYADSVKGR |
| Ab78 scFv | FTISRDNAKNSLYLQMNSLRAEDTAVYYCAKGTYYSSPKYSFDYWGQGTLVTVSSGGGGSGGGGSGG |
| (VH-VL) | GGSDIQMTQSPSSLSASVGDRVTITCRASQDIKNFLAWYQQKPGKAPKLLIYAASSLQSGVPSRFSG |
| | SGSGTDFTLTISSLQPEDFATYYCQQSYSTPWTFGQGTKLEIK (SEQ ID NO: 581) |
| TMPRSS4 | EVQLLESGGGLVQPGGSLRLSCAASGLTFSSYQMSSVSQAPGKGLEWVSYISSAANTVYYADSVKGR |
| Ab79 scFv | FTISRDNSKNTLYLQMNSLRAEDTAVYYCAREDESRSPYCSGGSCYRAEYFQHWGQGTLVTVSSGGG |
| (VH-VL) | GSGGGGSGGGGSDIQMTQSPSSLSASVGDRVTITCRASQGISNYLAWYQQKPGKAPKLLIYAASSLQ |
| | SGVPSRFSGSGSGTDFTLTISSLQPEDFATYYCQQSYSTPLTFGPGTKVDIK (SEQ ID NO: 582) |

[0483] In some embodiments, the antibody or antigen-binding fragment that binds to TMPRSS4 comprises an scFv comprising an amino acid sequence at least 80%, at least 85%, at least 90%, at least 91%, at least 92%, at least 93%, at least 94%, at least 95%, at least 96%, at least 97%, at least 98%, at least 99%, at least 99.5% or 100% identical to the amino acid sequence set forth in SEQ ID NO: 504, and optionally comprises VH CDRs and VL CDRs that are 100% identical to those therein. In some embodiments, the antibody or antigen-binding fragment that binds to TMPRSS4 comprises an scFv comprising the amino acid sequence set forth in SEQ ID NO: 504.

[0484] In some embodiments, the antibody or antigen-binding fragment that binds to TMPRSS4 comprises an scFv comprising an amino acid sequence at least 80%, at least 85%, at least 90%, at least 91%, at least 92%, at least 93%, at least 94%, at least 95%, at least 96%, at least 97%, at least 98%, at least 99%, at least 99.5% or 100% identical to the amino acid sequence set forth in SEQ ID NO: 505, and optionally comprises VH CDRs and VL CDRs that are 100% identical to those therein. In some embodiments, the antibody or antigen-binding fragment that binds to TMPRSS4 comprises an scFv comprising the amino acid sequence set forth in SEQ ID NO: 505.

[0485] In some embodiments, the antibody or antigen-binding fragment that binds to TMPRSS4 comprises an scFv comprising an amino acid sequence at least 80%, at least 85%, at least 90%, at least 91%, at least 92%, at least 93%, at least 94%, at least 95%, at least 96%, at least 97%, at least 98%, at least 99%, at least 99.5% or 100% identical to the amino acid sequence set forth in SEQ ID NO: 506, and optionally comprises VH CDRs and VL CDRs that are 100% identical to those therein. In some embodiments, the antibody or antigen-binding fragment that binds to TMPRSS4 comprises an scFv comprising the amino acid sequence set forth in SEQ ID NO: 506.

[0486] In some embodiments, the antibody or antigen-binding fragment that binds to TMPRSS4 comprises an scFv comprising an amino acid sequence at least 80%, at least 85%, at least 90%, at least 91%, at least 92%, at least 93%, at least 94%, at least 95%, at least 96%, at least 97%, at least 98%, at least 99%, at least 99.5% or 100% identical to the amino acid sequence set forth in SEQ ID NO: 507, and optionally comprises VH CDRs and VL CDRs that are 100% identical to those therein. In some embodiments, the antibody or antigen-binding fragment that binds to TMPRSS4 comprises an scFv comprising the amino acid sequence set forth in SEQ ID NO: 507.

[0487] In some embodiments, the antibody or antigen-binding fragment that binds to TMPRSS4 comprises an scFv comprising an amino acid sequence at least 80%, at least 85%, at least 90%, at least 91%, at least 92%, at least 93%, at least 94%, at least 95%, at least 96%, at least 97%, at least 98%, at least 99%, at least 99.5% or 100% identical to the amino acid sequence set forth in SEQ ID NO: 508, and optionally comprises VH CDRs and VL CDRs that are 100% identical to those therein. In some embodiments, the antibody or antigen-binding fragment that binds to TMPRSS4 comprises an scFv comprising the amino acid sequence set forth in SEQ ID NO: 508.

[0488] In some embodiments, the antibody or antigen-binding fragment that binds to TMPRSS4 comprises an scFv comprising an amino acid sequence at least 80%, at least 85%, at least 90%, at least 91%, at least 92%, at least 93%, at least 94%, at least 95%, at least 96%, at least 97%, at least 98%, at least 99%, at least 99.5% or 100% identical to the amino acid sequence set forth in SEQ ID NO: 509, and optionally comprises VH CDRs and VL CDRs that are 100% identical to those therein. In some embodiments, the antibody or antigen-binding fragment that binds to TMPRSS4 comprises an scFv comprising the amino acid sequence set forth in SEQ ID NO: 509.

[0489] In some embodiments, the antibody or antigen-binding fragment that binds to TMPRSS4 comprises an scFv comprising an amino acid sequence at least 80%, at least 85%, at least 90%, at least 91%, at least 92%, at least 93%, at least 94%, at least 95%, at least 96%, at least 97%, at least 98%, at least 99%, at least 99.5% or 100% identical to the amino acid sequence set forth in SEQ ID NO: 510, and optionally comprises VH CDRs and VL CDRs that are 100% identical to those therein. In some embodiments, the antibody or antigen-binding fragment that binds to TMPRSS4 comprises an scFv comprising the amino acid sequence set forth in SEQ ID NO: 510.

[0490] In some embodiments, the antibody or antigen-binding fragment that binds to TMPRSS4 comprises an scFv comprising an amino acid sequence at least 80%, at least 85%, at least 90%, at least 91%, at least 92%, at least 93%, at least 94%, at least 95%, at least 96%, at least 97%, at least 98%, at least 99%, at least 99.5% or 100% identical to the amino acid sequence set forth in SEQ ID NO: 511, and optionally comprises VH CDRs and VL CDRs that are 100% identical to those therein. In some embodiments, the antibody or antigen-binding fragment that binds to TMPRSS4 comprises an scFv comprising the amino acid sequence set forth in SEQ ID NO: 511.

[0491] In some embodiments, the antibody or antigen-binding fragment that binds to TMPRSS4 comprises an scFv comprising an amino acid sequence at least 80%, at least 85%, at least 90%, at least 91%, at least 92%, at least 93%, at least 94%, at least 95%, at least 96%, at least 97%, at least 98%, at least 99%, at least 99.5% or 100% identical to the amino acid sequence set forth in SEQ ID NO: 512, and optionally comprises VH CDRs and VL CDRs that are 100% identical to those therein. In some embodiments, the antibody or antigen-binding fragment that binds to TMPRSS4 comprises an scFv comprising the amino acid sequence set forth in SEQ ID NO: 512.

[0492] In some embodiments, the antibody or antigen-binding fragment that binds to TMPRSS4 comprises an scFv comprising an amino acid sequence at least 80%, at least 85%, at least 90%, at least 91%, at least 92%, at least 93%, at least 94%, at least 95%, at least 96%, at least 97%, at least 98%, at least 99%, at least 99.5% or 100% identical to the amino acid sequence set forth in SEQ ID NO: 513, and optionally comprises VH CDRs and VL CDRs that are 100% identical to those therein. In some embodiments, the antibody or antigen-binding fragment that binds to TMPRSS4 comprises an scFv comprising the amino acid sequence set forth in SEQ ID NO: 513.

[0493] In some embodiments, the antibody or antigen-binding fragment that binds to TMPRSS4 comprises an scFv comprising an amino acid sequence at least 80%, at least 85%, at least 90%, at least 91%, at least 92%, at least 93%, at least 94%, at least 95%, at least 96%, at least 97%, at least 98%, at least 99%, at least 99.5% or 100% identical to the amino acid sequence set forth in SEQ ID NO: 514, and optionally comprises VH CDRs and VL CDRs that are 100% identical to those therein. In some embodiments, the antibody or antigen-binding fragment that binds to TMPRSS4 comprises an scFv comprising the amino acid sequence set forth in SEQ ID NO: 514.

[0494] In some embodiments, the antibody or antigen-binding fragment that binds to TMPRSS4 comprises an scFv comprising an amino acid sequence at least 80%, at least 85%, at least 90%, at least 91%, at least 92%, at least 93%, at least 94%, at least 95%, at least 96%, at least 97%, at least 98%, at least 99%, at least 99.5% or 100% identical to the amino acid sequence set forth in SEQ ID NO: 515, and optionally comprises VH CDRs and VL CDRs that are 100% identical to those therein. In some embodiments, the antibody or antigen-binding fragment that binds to TMPRSS4 comprises an scFv comprising the amino acid sequence set forth in SEQ ID NO: 515.

[0495] In some embodiments, the antibody or antigen-binding fragment that binds to TMPRSS4 comprises an scFv comprising an amino acid sequence at least 80%, at least 85%, at least 90%, at least 91%, at least 92%, at least 93%, at least 94%, at least 95%, at least 96%, at least 97%, at least 98%, at least 99%, at least 99.5% or 100% identical to the amino acid sequence set forth in SEQ ID NO: 516, and optionally comprises VH CDRs and VL CDRs that are 100% identical to those therein. In some embodiments, the antibody or antigen-binding fragment that binds to TMPRSS4 comprises an scFv comprising the amino acid sequence set forth in SEQ ID NO: 516.

[0496] In some embodiments, the antibody or antigen-binding fragment that binds to TMPRSS4 comprises an scFv comprising an amino acid sequence at least 80%, at least 85%, at least 90%, at least 91%, at least 92%, at least 93%, at least 94%, at least 95%, at least 96%, at least 97%, at least 98%, at least 99%, at least 99.5% or 100% identical to the amino acid sequence set forth in SEQ ID NO: 517, and optionally comprises VH CDRs and VL CDRs that are 100% identical to those therein. In some embodiments, the antibody or antigen-binding fragment that binds to TMPRSS4 comprises an scFv comprising the amino acid sequence set forth in SEQ ID NO: 517.

[0497] In some embodiments, the antibody or antigen-binding fragment that binds to TMPRSS4 comprises an scFv comprising an amino acid sequence at least 80%, at least 85%, at least 90%, at least 91%, at least 92%, at least 93%, at least 94%, at least 95%, at least 96%, at least 97%, at least 98%, at least 99%, at least 99.5% or 100% identical to the amino acid sequence set forth in SEQ ID NO: 518, and optionally comprises VH CDRs and VL CDRs that are 100% identical to those therein. In some embodiments, the antibody or antigen-binding fragment that binds to TMPRSS4 comprises an scFv comprising the amino acid sequence set forth in SEQ ID NO: 518.

[0498] In some embodiments, the antibody or antigen-binding fragment that binds to TMPRSS4 comprises an scFv comprising an amino acid sequence at least 80%, at least 85%, at least 90%, at least 91%, at least 92%, at least 93%, at least 94%, at least 95%, at least 96%, at least 97%, at least 98%, at least 99%, at least 99.5% or 100% identical to the amino acid sequence set forth in SEQ ID NO: 519, and optionally comprises VH CDRs and VL CDRs that are 100% identical to those therein. In some embodiments, the antibody or antigen-binding fragment that binds to TMPRSS4 comprises an scFv comprising the amino acid sequence set forth in SEQ ID NO: 519.

[0499] In some embodiments, the antibody or antigen-binding fragment that binds to TMPRSS4 comprises an scFv comprising an amino acid sequence at least 80%, at least 85%, at least 90%, at least 91%, at least 92%, at least 93%, at least 94%, at least 95%, at least 96%, at least 97%, at least 98%, at least 99%, at least 99.5% or 100% identical to the amino acid sequence set forth in SEQ ID NO: 520, and optionally comprises VH CDRs and VL CDRs that are 100% identical to those therein. In some embodiments, the antibody or antigen-binding fragment that binds to TMPRSS4 comprises an scFv comprising the amino acid sequence set forth in SEQ ID NO: 520.

[0500] In some embodiments, the antibody or antigen-binding fragment that binds to TMPRSS4 comprises an scFv comprising an amino acid sequence at least 80%, at least 85%, at least 90%, at least 91%, at least 92%, at least 93%, at least 94%, at least 95%, at least 96%, at least 97%, at least 98%, at least 99%, at least 99.5% or 100% identical to the amino acid sequence set forth in SEQ ID NO: 521, and optionally comprises VH CDRs and VL CDRs that are 100% identical to those therein. In some embodiments, the antibody or antigen-binding fragment that binds to TMPRSS4 comprises an scFv comprising the amino acid sequence set forth in SEQ ID NO: 521.

[0501] In some embodiments, the antibody or antigen-binding fragment that binds to TMPRSS4 comprises an scFv comprising an amino acid sequence at least 80%, at least 85%, at least 90%, at least 91%, at least 92%, at least 93%, at least 94%, at least 95%, at least 96%, at least 97%, at least 98%, at least 99%, at least 99.5% or 100% identical to the amino acid sequence set forth in SEQ ID NO: 522, and optionally comprises VH CDRs and VL CDRs that are 100% identical to those therein. In some embodiments, the antibody or antigen-binding fragment that binds to TMPRSS4 comprises an scFv comprising the amino acid sequence set forth in SEQ ID NO: 522.

[0502] In some embodiments, the antibody or antigen-binding fragment that binds to TMPRSS4 comprises an scFv comprising an amino acid sequence at least 80%, at least 85%, at least 90%, at least 91%, at least 92%, at least 93%, at least 94%, at least 95%, at least 96%, at least 97%, at least 98%, at least 99%, at least 99.5% or 100% identical to the amino acid sequence set forth in SEQ ID NO: 523, and optionally comprises VH CDRs and VL CDRs that are 100% identical to those therein. In some embodiments, the antibody or antigen-binding fragment that binds to TMPRSS4 comprises an scFv comprising the amino acid sequence set forth in SEQ ID NO: 523.

[0503] In some embodiments, the antibody or antigen-binding fragment that binds to TMPRSS4 comprises an scFv comprising an amino acid sequence at least 80%, at least 85%, at least 90%, at least 91%, at least 92%, at least 93%, at least 94%, at least 95%, at least 96%, at least 97%, at least 98%, at least 99%, at least 99.5% or 100% identical to the amino acid sequence set forth in SEQ ID NO: 524, and optionally comprises VH CDRs and VL CDRs that are 100% identical to those therein. In some embodiments, the antibody or antigen-binding fragment that binds to TMPRSS4 comprises an scFv comprising the amino acid sequence set forth in SEQ ID NO: 524.

[0504] In some embodiments, the antibody or antigen-binding fragment that binds to TMPRSS4 comprises an scFv comprising an amino acid sequence at least 80%, at least 85%, at least 90%, at least 91%, at least 92%, at least 93%, at least 94%, at least 95%, at least 96%, at least 97%, at least 98%, at least 99%, at least 99.5% or 100% identical to the amino acid sequence set forth in SEQ ID NO: 525, and optionally comprises VH CDRs and VL CDRs that are 100% identical to those therein. In some embodiments, the antibody or antigen-binding fragment that binds to TMPRSS4 comprises an scFv comprising the amino acid sequence set forth in SEQ ID NO: 525.

[0505] In some embodiments, the antibody or antigen-binding fragment that binds to TMPRSS4 comprises an scFv comprising an amino acid sequence at least 80%, at least 85%, at least 90%, at least 91%, at least 92%, at least 93%, at least 94%, at least 95%, at least 96%, at least 97%, at least 98%, at least 99%, at least 99.5% or 100% identical to the amino acid sequence set forth in SEQ ID NO: 526, and optionally comprises VH CDRs and VL CDRs that are 100% identical to those therein. In some embodiments, the antibody or antigen-binding fragment that binds to TMPRSS4 comprises an scFv comprising the amino acid sequence set forth in SEQ ID NO: 526.

[0506] In some embodiments, the antibody or antigen-binding fragment that binds to TMPRSS4 comprises an scFv comprising an amino acid sequence at least 80%, at least 85%, at least 90%, at least 91%, at least 92%, at least 93%, at least 94%, at least 95%, at least 96%, at least 97%, at least 98%, at least 99%, at least 99.5% or 100% identical to the amino acid sequence set forth in SEQ ID NO: 527, and optionally comprises VH CDRs and VL CDRs that are 100% identical to those therein. In some embodiments, the antibody or antigen-binding fragment that binds to TMPRSS4 comprises an scFv comprising the amino acid sequence set forth in SEQ ID NO: 527.

[0507] In some embodiments, the antibody or antigen-binding fragment that binds to TMPRSS4 comprises an scFv comprising an amino acid sequence at least 80%, at least 85%, at least 90%, at least 91%, at least 92%, at least 93%, at least 94%, at least 95%, at least 96%, at least 97%, at least 98%, at least 99%, at least 99.5% or 100% identical to the amino acid sequence set forth in SEQ ID NO: 528, and optionally comprises VH CDRs and VL CDRs that are 100% identical to those therein. In some embodiments, the antibody or antigen-binding fragment that binds to TMPRSS4 comprises an scFv comprising the amino acid sequence set forth in SEQ ID NO: 528.

[0508] In some embodiments, the antibody or antigen-binding fragment that binds to TMPRSS4 comprises an scFv comprising an amino acid sequence at least 80%, at least 85%, at least 90%, at least 91%, at least 92%, at least 93%, at least 94%, at least 95%, at least 96%, at least 97%, at least 98%, at least 99%, at least 99.5% or 100% identical to the amino acid sequence set forth in SEQ ID NO: 529, and optionally comprises VH CDRs and VL CDRs that are 100% identical to those therein. In some embodiments, the antibody or antigen-binding fragment that binds to TMPRSS4 comprises an scFv comprising the amino acid sequence set forth in SEQ ID NO: 529.

[0509] In some embodiments, the antibody or antigen-binding fragment that binds to TMPRSS4 comprises an scFv comprising an amino acid sequence at least 80%, at least 85%, at least 90%, at least 91%, at least 92%, at least 93%, at least 94%, at least 95%, at least 96%, at least 97%, at least 98%, at least 99%, at least 99.5% or 100% identical to the amino acid sequence set forth in SEQ ID NO: 530, and optionally comprises VH CDRs and VL CDRs that are 100% identical to those therein. In some embodiments, the antibody or antigen-binding fragment that binds to TMPRSS4 comprises an scFv comprising the amino acid sequence set forth in SEQ ID NO: 530.

[0510] In some embodiments, the antibody or antigen-binding fragment that binds to TMPRSS4 comprises an scFv comprising an amino acid sequence at least 80%, at least 85%, at least 90%, at least 91%, at least 92%, at least 93%, at least 94%, at least 95%, at least 96%, at least 97%, at least 98%, at least 99%, at least 99.5% or 100% identical to the amino acid sequence set forth in SEQ ID NO: 531, and optionally comprises VH CDRs and VL CDRs that are 100% identical to those therein. In some embodiments, the antibody or antigen-binding fragment that binds to TMPRSS4 comprises an scFv comprising the amino acid sequence set forth in SEQ ID NO: 531.

[0511] In some embodiments, the antibody or antigen-binding fragment that binds to TMPRSS4 comprises an scFv comprising an amino acid sequence at least 80%, at least 85%, at least 90%, at least 91%, at least 92%, at least 93%, at least 94%, at least 95%, at least 96%, at least 97%, at least 98%, at least 99%, at least 99.5% or 100% identical to the amino acid sequence set forth in SEQ ID NO: 532, and optionally comprises VH CDRs and VL CDRs that are 100% identical to those therein. In some embodiments, the antibody or antigen-binding fragment that binds to TMPRSS4 comprises an scFv comprising the amino acid sequence set forth in SEQ ID NO: 532.

[0512] In some embodiments, the antibody or antigen-binding fragment that binds to TMPRSS4 comprises an scFv comprising an amino acid sequence at least 80%, at least 85%, at least 90%, at least 91%, at least 92%, at least 93%, at least 94%, at least 95%, at least 96%, at least 97%, at least 98%, at least 99%, at least 99.5% or 100% identical to the amino acid sequence set forth in SEQ ID NO: 533, and optionally comprises VH CDRs and VL CDRs that are 100% identical to those therein. In some embodiments, the antibody or antigen-binding fragment that binds to TMPRSS4 comprises an scFv comprising the amino acid sequence set forth in SEQ ID NO: 533.

[0513] In some embodiments, the antibody or antigen-binding fragment that binds to TMPRSS4 comprises an scFv comprising an amino acid sequence at least 80%, at least 85%, at least 90%, at least 91%, at least 92%, at least 93%, at least 94%, at least 95%, at least 96%, at least 97%, at least 98%, at least 99%, at least 99.5% or 100% identical to the amino acid sequence set forth in SEQ ID NO: 534, and optionally comprises VH CDRs and VL CDRs that are 100% identical to those therein. In some embodiments, the antibody or antigen-binding fragment that binds to TMPRSS4 comprises an scFv comprising the amino acid sequence set forth in SEQ ID NO: 534.

[0514] In some embodiments, the antibody or antigen-binding fragment that binds to TMPRSS4 comprises an scFv comprising an amino acid sequence at least 80%, at least 85%, at least 90%, at least 91%, at least 92%, at least 93%, at least 94%, at least 95%, at least 96%, at least 97%, at least 98%, at least 99%, at least 99.5% or 100% identical to the amino acid sequence set forth in SEQ ID NO: 535, and optionally comprises VH CDRs and VL CDRs that are 100% identical to those therein. In some embodiments, the antibody or antigen-binding fragment that binds to TMPRSS4 comprises an scFv comprising the amino acid sequence set forth in SEQ ID NO: 535.

[0515] In some embodiments, the antibody or antigen-binding fragment that binds to TMPRSS4 comprises an scFv comprising an amino acid sequence at least 80%, at least 85%, at least 90%, at least 91%, at least 92%, at least 93%, at least 94%, at least 95%, at least 96%, at least 97%, at least 98%, at least 99%, at least 99.5% or 100% identical to the amino acid sequence set forth in SEQ ID NO: 536, and optionally comprises VH CDRs and VL CDRs that are 100% identical to those therein. In some embodiments, the antibody or antigen-binding fragment that binds to TMPRSS4 comprises an scFv comprising the amino acid sequence set forth in SEQ ID NO: 536.

[0516] In some embodiments, the antibody or antigen-binding fragment that binds to TMPRSS4 comprises an scFv comprising an amino acid sequence at least 80%, at least 85%, at least 90%, at least 91%, at least 92%, at least 93%, at least 94%, at least 95%, at least 96%, at least 97%, at least 98%, at least 99%, at least 99.5% or 100% identical to the amino acid sequence set forth in SEQ ID NO: 537, and optionally comprises VH CDRs and VL CDRs that are 100% identical to those therein. In some embodiments, the antibody or antigen-binding fragment that binds to TMPRSS4 comprises an scFv comprising the amino acid sequence set forth in SEQ ID NO: 537.

[0517] In some embodiments, the antibody or antigen-binding fragment that binds to TMPRSS4 comprises an scFv comprising an amino acid sequence at least 80%, at least 85%, at least 90%, at least 91%, at least 92%, at least 93%, at least 94%, at least 95%, at least 96%, at least 97%, at least 98%, at least 99%, at least 99.5% or 100% identical to the amino acid sequence set forth in SEQ ID NO: 538, and optionally comprises VH CDRs and VL CDRs that are 100% identical to those therein. In some embodiments, the antibody or antigen-binding fragment that binds to TMPRSS4 comprises an scFv comprising the amino acid sequence set forth in SEQ ID NO: 538.

[0518] In some embodiments, the antibody or antigen-binding fragment that binds to TMPRSS4 comprises an scFv comprising an amino acid sequence at least 80%, at least 85%, at least 90%, at least 91%, at least 92%, at least 93%, at least 94%, at least 95%, at least 96%, at least 97%, at least 98%, at least 99%, at least 99.5% or 100% identical to the amino acid sequence set forth in SEQ ID NO: 539, and optionally comprises VH CDRs and VL CDRs that are 100% identical to those therein. In some embodiments, the antibody or antigen-binding fragment that binds to TMPRSS4 comprises an scFv comprising the amino acid sequence set forth in SEQ ID NO: 539.

[0519] In some embodiments, the antibody or antigen-binding fragment that binds to TMPRSS4 comprises an scFv comprising an amino acid sequence at least 80%, at least 85%, at least 90%, at least 91%, at least 92%, at least 93%, at least 94%, at least 95%, at least 96%, at least 97%, at least 98%, at least 99%, at least 99.5% or 100% identical to the amino acid sequence set forth in SEQ ID NO: 540, and optionally comprises VH CDRs and VL CDRs that are 100% identical to those therein. In some embodiments, the antibody or antigen-binding fragment that binds to TMPRSS4 comprises an scFv comprising the amino acid sequence set forth in SEQ ID NO: 540.

[0520] In some embodiments, the antibody or antigen-binding fragment that binds to TMPRSS4 comprises an scFv comprising an amino acid sequence at least 80%, at least 85%, at least 90%, at least 91%, at least 92%, at least 93%, at least 94%, at least 95%, at least 96%, at least 97%, at least 98%, at least 99%, at least 99.5% or 100% identical to the amino acid sequence set forth in SEQ ID NO: 541, and optionally comprises VH CDRs and VL CDRs that are 100% identical to those therein. In some embodiments, the antibody or antigen-binding fragment that binds to TMPRSS4 comprises an scFv comprising the amino acid sequence set forth in SEQ ID NO: 541.

[0521] In some embodiments, the antibody or antigen-binding fragment that binds to TMPRSS4 comprises an scFv comprising an amino acid sequence at least 80%, at least 85%, at least 90%, at least 91%, at least 92%, at least 93%, at least 94%, at least 95%, at least 96%, at least 97%, at least 98%, at least 99%, at least 99.5% or 100% identical to the amino acid sequence set forth in SEQ ID NO: 542, and optionally comprises VH CDRs and VL CDRs that are 100% identical to those therein. In some embodiments, the antibody or antigen-binding fragment that binds to TMPRSS4 comprises an scFv comprising the amino acid sequence set forth in SEQ ID NO: 542.

[0522] In some embodiments, the antibody or antigen-binding fragment that binds to TMPRSS4 comprises an scFv comprising an amino acid sequence at least 80%, at least 85%, at least 90%, at least 91%, at least 92%, at least 93%, at least 94%, at least 95%, at least 96%, at least 97%, at least 98%, at least 99%, at least 99.5% or 100% identical to the amino acid sequence set forth in SEQ ID NO: 543, and optionally comprises VH CDRs and VL CDRs that are 100% identical to those therein. In some embodiments, the antibody or antigen-binding fragment that binds to TMPRSS4 comprises an scFv comprising the amino acid sequence set forth in SEQ ID NO: 543.

[0523] In some embodiments, the antibody or antigen-binding fragment that binds to TMPRSS4 comprises an scFv comprising an amino acid sequence at least 80%, at least 85%, at least 90%, at least 91%, at least 92%, at least 93%, at least 94%, at least 95%, at least 96%, at least 97%, at least 98%, at least 99%, at least 99.5% or 100% identical to the amino acid sequence set forth in SEQ ID NO: 544, and optionally comprises VH CDRs and VL CDRs that are 100% identical to those therein. In some embodiments, the antibody or antigen-binding fragment that binds to TMPRSS4 comprises an scFv comprising the amino acid sequence set forth in SEQ ID NO: 544.

[0524] In some embodiments, the antibody or antigen-binding fragment that binds to TMPRSS4 comprises an scFv comprising an amino acid sequence at least 80%, at least 85%, at least 90%, at least 91%, at least 92%, at least 93%, at least 94%, at least 95%, at least 96%, at least 97%, at least 98%, at least 99%, at least 99.5% or 100% identical to the amino acid sequence set forth in SEQ ID NO: 545, and optionally comprises VH CDRs and VL CDRs that are 100% identical to those therein. In some embodiments, the antibody or antigen-binding fragment that binds to TMPRSS4 comprises an scFv comprising the amino acid sequence set forth in SEQ ID NO: 545.

[0525] In some embodiments, the antibody or antigen-binding fragment that binds to TMPRSS4 comprises an scFv comprising an amino acid sequence at least 80%, at least 85%, at least 90%, at least 91%, at least 92%, at least 93%, at least 94%, at least 95%, at least 96%, at least 97%, at least 98%, at least 99%, at least 99.5% or 100% identical to the amino acid sequence set forth in SEQ ID NO: 546, and optionally comprises VH CDRs and VL CDRs that are 100% identical to those therein. In some embodiments, the antibody or antigen-binding fragment that binds to TMPRSS4 comprises an scFv comprising the amino acid sequence set forth in SEQ ID NO: 546.

[0526] In some embodiments, the antibody or antigen-binding fragment that binds to TMPRSS4 comprises an scFv comprising an amino acid sequence at least 80%, at least 85%, at least 90%, at least 91%, at least 92%, at least 93%, at least 94%, at least 95%, at least 96%, at least 97%, at least 98%, at least 99%, at least 99.5% or 100% identical to the amino acid sequence set forth in SEQ ID NO: 547, and optionally comprises VH CDRs and VL CDRs that are 100% identical to those therein. In some embodiments, the antibody or antigen-binding fragment that binds to TMPRSS4 comprises an scFv comprising the amino acid sequence set forth in SEQ ID NO: 547.

[0527] In some embodiments, the antibody or antigen-binding fragment that binds to TMPRSS4 comprises an scFv comprising an amino acid sequence at least 80%, at least 85%, at least 90%, at least 91%, at least 92%, at least 93%, at least 94%, at least 95%, at least 96%, at least 97%, at least 98%, at least 99%, at least 99.5% or 100% identical to the amino acid sequence set forth in SEQ ID NO: 548, and optionally comprises VH CDRs and VL CDRs that are 100% identical to those therein. In some embodiments, the antibody or antigen-binding fragment that binds to TMPRSS4 comprises an scFv comprising the amino acid sequence set forth in SEQ ID NO: 548.

[0528] In some embodiments, the antibody or antigen-binding fragment that binds to TMPRSS4 comprises an scFv comprising an amino acid sequence at least 80%, at least 85%, at least 90%, at least 91%, at least 92%, at least 93%, at least 94%, at least 95%, at least 96%, at least 97%, at least 98%, at least 99%, at least 99.5% or 100% identical to the amino acid sequence set forth in SEQ ID NO: 549, and optionally comprises VH CDRs and VL CDRs that are 100% identical to those therein. In some embodiments, the antibody or antigen-binding fragment that binds to TMPRSS4 comprises an scFv comprising the amino acid sequence set forth in SEQ ID NO: 549.

[0529] In some embodiments, the antibody or antigen-binding fragment that binds to TMPRSS4 comprises an scFv comprising an amino acid sequence at least 80%, at least 85%, at least 90%, at least 91%, at least 92%, at least 93%, at least 94%, at least 95%, at least 96%, at least 97%, at least 98%, at least 99%, at least 99.5% or 100% identical to the amino acid sequence set forth in SEQ ID NO: 550, and optionally comprises VH CDRs and VL CDRs that are 100% identical to those therein. In some embodiments, the antibody or antigen-binding fragment that binds to TMPRSS4 comprises an scFv comprising the amino acid sequence set forth in SEQ ID NO: 550.

[0530] In some embodiments, the antibody or antigen-binding fragment that binds to TMPRSS4 comprises an scFv comprising an amino acid sequence at least 80%, at least 85%, at least 90%, at least 91%, at least 92%, at least 93%, at least 94%, at least 95%, at least 96%, at least 97%, at least 98%, at least 99%, at least 99.5% or 100% identical to the amino acid sequence set forth in SEQ ID NO: 551, and optionally comprises VH CDRs and VL CDRs that are 100% identical to those therein. In some embodiments, the antibody or antigen-binding fragment that binds to TMPRSS4 comprises an scFv comprising the amino acid sequence set forth in SEQ ID NO: 551.

[0531] In some embodiments, the antibody or antigen-binding fragment that binds to TMPRSS4 comprises an scFv comprising an amino acid sequence at least 80%, at least 85%, at least 90%, at least 91%, at least 92%, at least 93%, at least 94%, at least 95%, at least 96%, at least 97%, at least 98%, at least 99%, at least 99.5% or 100% identical to the amino acid sequence set forth in SEQ ID NO: 552, and optionally comprises VH CDRs and VL CDRs that are 100% identical to those therein. In some embodiments, the antibody or antigen-binding fragment that binds to TMPRSS4 comprises an scFv comprising the amino acid sequence set forth in SEQ ID NO: 552.

[0532] In some embodiments, the antibody or antigen-binding fragment that binds to TMPRSS4 comprises an scFv comprising an amino acid sequence at least 80%, at least 85%, at least 90%, at least 91%, at least 92%, at least 93%, at least 94%, at least 95%, at least 96%, at least 97%, at least 98%, at least 99%, at least 99.5% or 100% identical to the amino acid sequence set forth in SEQ ID NO: 553, and optionally comprises VH CDRs and VL CDRs that are 100% identical to those therein. In some embodiments, the antibody or antigen-binding fragment that binds to TMPRSS4 comprises an scFv comprising the amino acid sequence set forth in SEQ ID NO: 553.

[0533] In some embodiments, the antibody or antigen-binding fragment that binds to TMPRSS4 comprises an scFv comprising an amino acid sequence at least 80%, at least 85%, at least 90%, at least 91%, at least 92%, at least 93%, at least 94%, at least 95%, at least 96%, at least 97%, at least 98%, at least 99%, at least 99.5% or 100% identical to the amino acid sequence set forth in SEQ ID NO: 554, and optionally comprises VH CDRs and VL CDRs that are 100% identical to those therein. In some embodiments, the antibody or antigen-binding fragment that binds to TMPRSS4 comprises an scFv comprising the amino acid sequence set forth in SEQ ID NO: 554.

[0534] In some embodiments, the antibody or antigen-binding fragment that binds to TMPRSS4 comprises an scFv comprising an amino acid sequence at least 80%, at least 85%, at least 90%, at least 91%, at least 92%, at least 93%, at least 94%, at least 95%, at least 96%, at least 97%, at least 98%, at least 99%, at least 99.5% or 100% identical to the amino acid sequence set forth in SEQ ID NO: 555, and optionally comprises VH CDRs and VL CDRs that are 100% identical to those therein. In some embodiments, the antibody or antigen-binding fragment that binds to TMPRSS4 comprises an scFv comprising the amino acid sequence set forth in SEQ ID NO: 555.

[0535] In some embodiments, the antibody or antigen-binding fragment that binds to TMPRSS4 comprises an scFv comprising an amino acid sequence at least 80%, at least 85%, at least 90%, at least 91%, at least 92%, at least 93%, at least 94%, at least 95%, at least 96%, at least 97%, at least 98%, at least 99%, at least 99.5% or 100% identical to the amino acid sequence set forth in SEQ ID NO: 556, and optionally comprises VH CDRs and VL CDRs that are 100% identical to those therein. In some embodiments, the antibody or antigen-binding fragment that binds to TMPRSS4 comprises an scFv comprising the amino acid sequence set forth in SEQ ID NO: 556.

[0536] In some embodiments, the antibody or antigen-binding fragment that binds to TMPRSS4 comprises an scFv comprising an amino acid sequence at least 80%, at least 85%, at least 90%, at least 91%, at least 92%, at least 93%, at least 94%, at least 95%, at least 96%, at least 97%, at least 98%, at least 99%, at least 99.5% or 100% identical to the amino acid sequence set forth in SEQ ID NO: 557, and optionally comprises VH CDRs and VL CDRs that are 100% identical to those therein. In some embodiments, the antibody or antigen-binding fragment that binds to TMPRSS4 comprises an scFv comprising the amino acid sequence set forth in SEQ ID NO: 557.

[0537] In some embodiments, the antibody or antigen-binding fragment that binds to TMPRSS4 comprises an scFv comprising an amino acid sequence at least 80%, at least 85%, at least 90%, at least 91%, at least 92%, at least 93%, at least 94%, at least 95%, at least 96%, at least 97%, at least 98%, at least 99%, at least 99.5% or 100% identical to the amino acid sequence set forth in SEQ ID NO: 558, and optionally comprises VH CDRs and VL CDRs that are 100% identical to those therein. In some embodiments, the antibody or antigen-binding fragment that binds to TMPRSS4 comprises an scFv comprising the amino acid sequence set forth in SEQ ID NO: 558.

[0538] In some embodiments, the antibody or antigen-binding fragment that binds to TMPRSS4 comprises an scFv comprising an amino acid sequence at least 80%, at least 85%, at least 90%, at least 91%, at least 92%, at least 93%, at least 94%, at least 95%, at least 96%, at least 97%, at least 98%, at least 99%, at least 99.5% or 100% identical to the amino acid sequence set forth in SEQ ID NO: 559, and optionally comprises VH CDRs and VL CDRs that are 100% identical to those therein. In some embodiments, the antibody or antigen-binding fragment that binds to TMPRSS4 comprises an scFv comprising the amino acid sequence set forth in SEQ ID NO: 559.

[0539] In some embodiments, the antibody or antigen-binding fragment that binds to TMPRSS4 comprises an scFv comprising an amino acid sequence at least 80%, at least 85%, at least 90%, at least 91%, at least 92%, at least 93%, at least 94%, at least 95%, at least 96%, at least 97%, at least 98%, at least 99%, at least 99.5% or 100% identical to the amino acid sequence set forth in SEQ ID NO: 560, and optionally comprises VH CDRs and VL CDRs that are 100% identical to those therein. In some embodiments, the antibody or antigen-binding fragment that binds to TMPRSS4 comprises an scFv comprising the amino acid sequence set forth in SEQ ID NO: 560.

[0540] In some embodiments, the antibody or antigen-binding fragment that binds to TMPRSS4 comprises an scFv comprising an amino acid sequence at least 80%, at least 85%, at least 90%, at least 91%, at least 92%, at least 93%, at least 94%, at least 95%, at least 96%, at least 97%, at least 98%, at least 99%, at least 99.5% or 100% identical to the amino acid sequence set forth in SEQ ID NO: 561, and optionally comprises VH CDRs and VL CDRs that are 100% identical to those therein. In some embodiments, the antibody or antigen-binding fragment that binds to TMPRSS4 comprises an scFv comprising the amino acid sequence set forth in SEQ ID NO: 561.

[0541] In some embodiments, the antibody or antigen-binding fragment that binds to TMPRSS4 comprises an scFv comprising an amino acid sequence at least 80%, at least 85%, at least 90%, at least 91%, at least 92%, at least 93%, at least 94%, at least 95%, at least 96%, at least 97%, at least 98%, at least 99%, at least 99.5% or 100% identical to the amino acid sequence set forth in SEQ ID NO: 562, and optionally comprises VH CDRs and VL CDRs that are 100% identical to those therein. In some embodiments, the antibody or antigen-binding fragment that binds to TMPRSS4 comprises an scFv comprising the amino acid sequence set forth in SEQ ID NO: 562.

[0542] In some embodiments, the antibody or antigen-binding fragment that binds to TMPRSS4 comprises an scFv comprising an amino acid sequence at least 80%, at least 85%, at least 90%, at least 91%, at least 92%, at least 93%, at least 94%, at least 95%, at least 96%, at least 97%, at least 98%, at least 99%, at least 99.5% or 100% identical to the amino acid sequence set forth in SEQ ID NO: 563, and optionally comprises VH CDRs and VL CDRs that are 100% identical to those therein. In some embodiments, the antibody or antigen-binding fragment that binds to TMPRSS4 comprises an scFv comprising the amino acid sequence set forth in SEQ ID NO: 563.

[0543] In some embodiments, the antibody or antigen-binding fragment that binds to TMPRSS4 comprises an scFv comprising an amino acid sequence at least 80%, at least 85%, at least 90%, at least 91%, at least 92%, at least 93%, at least 94%, at least 95%, at least 96%, at least 97%, at least 98%, at least 99%, at least 99.5% or 100% identical to the amino acid sequence set forth in SEQ ID NO: 564, and optionally comprises VH CDRs and VL CDRs that are 100% identical to those therein. In some embodiments, the antibody or antigen-binding fragment that binds to TMPRSS4 comprises an scFv comprising the amino acid sequence set forth in SEQ ID NO: 564.

[0544] In some embodiments, the antibody or antigen-binding fragment that binds to TMPRSS4 comprises an scFv comprising an amino acid sequence at least 80%, at least 85%, at least 90%, at least 91%, at least 92%, at least 93%, at least 94%, at least 95%, at least 96%, at least 97%, at least 98%, at least 99%, at least 99.5% or 100% identical to the amino acid sequence set forth in SEQ ID NO: 565, and optionally comprises VH CDRs and VL CDRs that are 100% identical to those therein. In some embodiments, the antibody or antigen-binding fragment that binds to TMPRSS4 comprises an scFv comprising the amino acid sequence set forth in SEQ ID NO: 565.

[0545] In some embodiments, the antibody or antigen-binding fragment that binds to TMPRSS4 comprises an scFv comprising an amino acid sequence at least 80%, at least 85%, at least 90%, at least 91%, at least 92%, at least 93%, at least 94%, at least 95%, at least 96%, at least 97%, at least 98%, at least 99%, at least 99.5% or 100% identical to the amino acid sequence set forth in SEQ ID NO: 566, and optionally comprises VH CDRs and VL CDRs that are 100% identical to those therein. In some embodiments, the antibody or antigen-binding fragment that binds to TMPRSS4 comprises an scFv comprising the amino acid sequence set forth in SEQ ID NO: 566.

[0546] In some embodiments, the antibody or antigen-binding fragment that binds to TMPRSS4 comprises an scFv comprising an amino acid sequence at least 80%, at least 85%, at least 90%, at least 91%, at least 92%, at least 93%, at least 94%, at least 95%, at least 96%, at least 97%, at least 98%, at least 99%, at least 99.5% or 100% identical to the amino acid sequence set forth in SEQ ID NO: 567, and optionally comprises VH CDRs and VL CDRs that are 100% identical to those therein. In some embodiments, the antibody or antigen-binding fragment that binds to TMPRSS4 comprises an scFv comprising the amino acid sequence set forth in SEQ ID NO: 567.

[0547] In some embodiments, the antibody or antigen-binding fragment that binds to TMPRSS4 comprises an scFv comprising an amino acid sequence at least 80%, at least 85%, at least 90%, at least 91%, at least 92%, at least 93%, at least 94%, at least 95%, at least 96%, at least 97%, at least 98%, at least 99%, at least 99.5% or 100% identical to the amino acid sequence set forth in SEQ ID NO: 568, and optionally comprises VH CDRs and VL CDRs that are 100% identical to those therein. In some embodiments, the antibody or antigen-binding fragment that binds to TMPRSS4 comprises an scFv comprising the amino acid sequence set forth in SEQ ID NO: 568.

[0548] In some embodiments, the antibody or antigen-binding fragment that binds to TMPRSS4 comprises an scFv comprising an amino acid sequence at least 80%, at least 85%, at least 90%, at least 91%, at least 92%, at least 93%, at least 94%, at least 95%, at least 96%, at least 97%, at least 98%, at least 99%, at least 99.5% or 100% identical to the amino acid sequence set forth in SEQ ID NO: 569, and optionally comprises VH CDRs and VL CDRs that are 100% identical to those therein. In some embodiments, the antibody or antigen-binding fragment that binds to TMPRSS4 comprises an scFv comprising the amino acid sequence set forth in SEQ ID NO: 569.

[0549] In some embodiments, the antibody or antigen-binding fragment that binds to TMPRSS4 comprises an scFv comprising an amino acid sequence at least 80%, at least 85%, at least 90%, at least 91%, at least 92%, at least 93%, at least 94%, at least 95%, at least 96%, at least 97%, at least 98%, at least 99%, at least 99.5% or 100% identical to the amino acid sequence set forth in SEQ ID NO: 570, and optionally comprises VH CDRs and VL CDRs that are 100% identical to those therein. In some embodiments, the antibody or antigen-binding fragment that binds to TMPRSS4 comprises an scFv comprising the amino acid sequence set forth in SEQ ID NO: 570.

[0550] In some embodiments, the antibody or antigen-binding fragment that binds to TMPRSS4 comprises an scFv comprising an amino acid sequence at least 80%, at least 85%, at least 90%, at least 91%, at least 92%, at least 93%, at least 94%, at least 95%, at least 96%, at least 97%, at least 98%, at least 99%, at least 99.5% or 100% identical to the amino acid sequence set forth in SEQ ID NO: 571, and optionally comprises VH CDRs and VL CDRs that are 100% identical to those therein. In some embodiments, the antibody or antigen-binding fragment that binds to TMPRSS4 comprises an scFv comprising the amino acid sequence set forth in SEQ ID NO: 571.

[0551] In some embodiments, the antibody or antigen-binding fragment that binds to TMPRSS4 comprises an scFv comprising an amino acid sequence at least 80%, at least 85%, at least 90%, at least 91%, at least 92%, at least 93%, at least 94%, at least 95%, at least 96%, at least 97%, at least 98%, at least 99%, at least 99.5% or 100% identical to the amino acid sequence set forth in SEQ ID NO: 572, and optionally comprises VH CDRs and VL CDRs that are 100% identical to those therein. In some embodiments, the antibody or antigen-binding fragment that binds to TMPRSS4 comprises an scFv comprising the amino acid sequence set forth in SEQ ID NO: 572.

[0552] In some embodiments, the antibody or antigen-binding fragment that binds to TMPRSS4 comprises an scFv comprising an amino acid sequence at least 80%, at least 85%, at least 90%, at least 91%, at least 92%, at least 93%, at least 94%, at least 95%, at least 96%, at least 97%, at least 98%, at least 99%, at least 99.5% or 100% identical to the amino acid sequence set forth in SEQ ID NO: 573, and optionally comprises VH CDRs and VL CDRs that are 100% identical to those therein. In some embodiments, the antibody or antigen-binding fragment that binds to TMPRSS4 comprises an scFv comprising the amino acid sequence set forth in SEQ ID NO: 573.

[0553] In some embodiments, the antibody or antigen-binding fragment that binds to TMPRSS4 comprises an scFv comprising an amino acid sequence at least 80%, at least 85%, at least 90%, at least 91%, at least 92%, at least 93%, at least 94%, at least 95%, at least 96%, at least 97%, at least 98%, at least 99%, at least 99.5% or 100% identical to the amino acid sequence set forth in SEQ ID NO: 574, and optionally comprises VH CDRs and VL CDRs that are 100% identical to those therein. In some embodiments, the antibody or antigen-binding fragment that binds to TMPRSS4 comprises an scFv comprising the amino acid sequence set forth in SEQ ID NO: 574.

[0554] In some embodiments, the antibody or antigen-binding fragment that binds to TMPRSS4 comprises an scFv comprising an amino acid sequence at least 80%, at least 85%, at least 90%, at least 91%, at least 92%, at least 93%, at least 94%, at least 95%, at least 96%, at least 97%, at least 98%, at least 99%, at least 99.5% or 100% identical to the amino acid sequence set forth in SEQ ID NO: 575, and optionally comprises VH CDRs and VL CDRs that are 100% identical to those therein. In some embodiments, the antibody or antigen-binding fragment that binds to TMPRSS4 comprises an scFv comprising the amino acid sequence set forth in SEQ ID NO: 575.

[0555] In some embodiments, the antibody or antigen-binding fragment that binds to TMPRSS4 comprises an scFv comprising an amino acid sequence at least 80%, at least 85%, at least 90%, at least 91%, at least 92%, at least 93%, at least 94%, at least 95%, at least 96%, at least 97%, at least 98%, at least 99%, at least 99.5% or 100% identical to the amino acid sequence set forth in SEQ ID NO: 576, and optionally comprises VH CDRs and VL CDRs that are 100% identical to those therein. In some embodiments, the antibody or antigen-binding fragment that binds to TMPRSS4 comprises an scFv comprising the amino acid sequence set forth in SEQ ID NO: 576.

[0556] In some embodiments, the antibody or antigen-binding fragment that binds to TMPRSS4 comprises an scFv comprising an amino acid sequence at least 80%, at least 85%, at least 90%, at least 91%, at least 92%, at least 93%, at least 94%, at least 95%, at least 96%, at least 97%, at least 98%, at least 99%, at least 99.5% or 100% identical to the amino acid sequence set forth in SEQ ID NO: 577, and optionally comprises VH CDRs and VL CDRs that are 100% identical to those therein. In some embodiments, the antibody or antigen-binding fragment that binds to TMPRSS4 comprises an scFv comprising the amino acid sequence set forth in SEQ ID NO: 577.

[0557] In some embodiments, the antibody or antigen-binding fragment that binds to TMPRSS4 comprises an scFv comprising an amino acid sequence at least 80%, at least 85%, at least 90%, at least 91%, at least 92%, at least 93%, at least 94%, at least 95%, at least 96%, at least 97%, at least 98%, at least 99%, at least 99.5% or 100% identical to the amino acid sequence set forth in SEQ ID NO: 578, and optionally comprises VH CDRs and VL CDRs that are 100% identical to those therein. In some embodiments, the antibody or antigen-binding fragment that binds to TMPRSS4 comprises an scFv comprising the amino acid sequence set forth in SEQ ID NO: 578.

[0558] In some embodiments, the antibody or antigen-binding fragment that binds to TMPRSS4 comprises an scFv comprising an amino acid sequence at least 80%, at least 85%, at least 90%, at least 91%, at least 92%, at least 93%, at least 94%, at least 95%, at least 96%, at least 97%, at least 98%, at least 99%, at least 99.5% or 100% identical to the amino acid sequence set forth in SEQ ID NO: 579, and optionally comprises VH CDRs and VL CDRs that are 100% identical to those therein. In some embodiments, the antibody or antigen-binding fragment that binds to TMPRSS4 comprises an scFv comprising the amino acid sequence set forth in SEQ ID NO: 579.

[0559] In some embodiments, the antibody or antigen-binding fragment that binds to TMPRSS4 comprises an scFv comprising an amino acid sequence at least 80%, at least 85%, at least 90%, at least 91%, at least 92%, at least 93%, at least 94%, at least 95%, at least 96%, at least 97%, at least 98%, at least 99%, at least 99.5% or 100% identical to the amino acid sequence set forth in SEQ ID NO: 580, and optionally comprises VH CDRs and VL CDRs that are 100% identical to those therein. In some embodiments, the antibody or antigen-binding fragment that binds to TMPRSS4 comprises an scFv comprising the amino acid sequence set forth in SEQ ID NO: 580.

[0560] In some embodiments, the antibody or antigen-binding fragment that binds to TMPRSS4 comprises an scFv comprising an amino acid sequence at least 80%, at least 85%, at least 90%, at least 91%, at least 92%, at least 93%, at least 94%, at least 95%, at least 96%, at least 97%, at least 98%, at least 99%, at least 99.5% or 100% identical to the amino acid sequence set forth in SEQ ID NO: 581, and optionally comprises VH CDRs and VL CDRs that are 100% identical to those therein. In some embodiments, the antibody or antigen-binding fragment that binds to TMPRSS4 comprises an scFv comprising the amino acid sequence set forth in SEQ ID NO: 581.

[0561] In some embodiments, the antibody or antigen-binding fragment that binds to TMPRSS4 comprises an scFv comprising an amino acid sequence at least 80%, at least 85%, at least 90%, at least 91%, at least 92%, at least 93%, at least 94%, at least 95%, at least 96%, at least 97%, at least 98%, at least 99%, at least 99.5% or 100% identical to the amino acid sequence set forth in SEQ ID NO: 582, and optionally comprises VH CDRs and VL CDRs that are 100% identical to those therein. In some embodiments, the antibody or antigen-binding fragment that binds to TMPRSS4 comprises an scFv comprising the amino acid sequence set forth in SEQ ID NO: 582.

[0562] Table 5 provides exemplary nucleic acid sequences encoding VH and VL domains that, in combination, bind to TMPRSS4. In some embodiments, the VH and the VL of the antibody or antigen-binding fragment that binds to TMPRSS4 are each encoded by a sequence set forth in Table 6.

TABLE 6
TMPRSS4 VH and VL Nucleic Acid Sequences

| Clone | VL Nucleic Acid Sequence | VH Nucleic Acid Sequence |
|---|---|---|
| TMPRSS4 | CAAGTGCAGCTCGTTCAGTCTGGGGCGGAGGT | GACATTCAGATGACTCAGTCGCCAAGTTCACT |
| Ab1 | TAAAAAACCGGGCTCATCTGTGAAAGTGTCTT | GTCAGCTTCCGTCGGCGATAGAGTCACTATTA |
| | GCAAGGCCTCCGGCTATACCTTCACCGATTAC | CTTGTCAAGCATCCCAGGATATATCCAACTAT |
| | TACATGCATTGGGTCCGGCAGGCACCCGGGCA | TTGAACTGGTACCAGCAGAAGCCCGGCAAGGC |
| | GGGACTTGAGTGGATGGGCGGGATTATCCCAA | ACCCAAGCTGCTGATATACAAGGCCTCCTCTC |
| | TCTTTGGGACTGCAAATTATGCTCAGAAATTC | TGGAATCAGGCGTGCCTAGCCGATTTTCTGGG |
| | CAAGGGCGCGTAACTATTACCGCCGACGAAAG | TCTGGGAGTGGCACAGATTTCACGCTGACAAT |
| | CACAAGCACCGCGTACATGGAGCTATCGAGCC | CAGCTCCTTACAGCCTGAGGACTTCGCCACCT |
| | TCCGTAGCGAGGACACCGCTGTGTACTATTGC | ATTATTGTCAACAAAGCAGCAGGATCCCTCCA |
| | GCCAAGGAAGGCGCTAATGGCTACTGGGGTCA | ACCTTTGGGCAGGGAACGAAAGTTGAAATCAA |
| | GGGAACATTGGTAACAGTGTCCAGT (SEQ ID | G (SEQ ID NO: 584) |
| | NO: 583) | |
| TMPRSS4 | GAAGTGCAGCTCCTAGAGTCTGGCGGCGGGCT | GACATACAGATGACACAGAGCCCGAGTTCCCT |
| Ab2 | GGTTCAACCTGGTGGGTCATTGCGGCTGAGCT | GTCCGCTAGTGTTGGGGACAGAGTCACCATTA |
| | GCGCTGCCAGTGGGTTCACCTTTTCAGATTAC | CATGCAGGGCCTCGCAGAGCACTAACAACTAT |
| | TACATGTCATGGGTCCGGCAGGCTCCCGGGAA | GTGAATTGGTATCAGCAAAAACCCGGCAAAGC |
| | GGGCCTTGAGTGGGTGTCCTACATCTCAGGTT | ACCAAAACTGCTGATATACGCGGCCTCCTCCC |
| | CTGGCGATGCAATCTACTATGCTGACTCTGTA | TCCAATCTGGTGTGCCTTCTCGTTTTAGCGGG |
| | AAGGGCCGCTTCACCATTAGCCGCGACAATTC | AGTGGGTCGGGCACTGATTTCACGCTCACAAT |
| | AAAAAATACTCTGTACCTCCAGATGAACAGCC | CAGTTCCTTGCAGCCCGAGGACTTTGCCACCT |
| | TTCGAGCCGAAGATACTGCCGTGTACTATTGT | ACTATTGTCAACAGAGCTATAGCATTCCTTTA |
| | GCAAGGGATAGGTCTGATTGCGGTGGGGACGA | ACCTTCGGACCAGGGACAAAGGTCGATATCAA |
| | CAGATTCCTGTGTGACGGTTATTTTGACCTGT | G (SEQ ID NO: 586) |
| | GGGGAAGAGGCACGCTTGTGTCCTTGTCT | |
| | (SEQ ID NO: 585) | |
| TMPRSS4 | CAGGTTCAGCTCGTCCAGTCTGGGGCAGAAGT | GACATAGTTATGACTCAGTCACCACTGTCCCT |
| Ab3 | GAAAAAACCTGGAAGCAGCGTAAAAGTCTCCT | CCCTGTGACTCCTGGCGAGCCCGCCTCAATCT |
| | GCAAGGCCTCCGGATATACGTTCACCTCTTAT | CCTGTAGGAGTTCAGGGTCCCTGCTGCATTCT |
| | GACATTAACTGGGTGCGGCAGGCACCCGGCCA | AATGGCTACAATTACCTGGACTGGTACCTGCA |
| | GGGCCTTGAGTGGATGGGCGGGATTATCCCAA | AAAGCCCGGGCAATCACCGCAGCTATTGATCT |
| | TTTTTGGGACCACAAAGTTTGCTCAGAAGTTT | ACGCGGCAAGTAGCTTACAGAGCGGCGTGCCT |
| | CAGGGCCGCGTGACCATAACCGCTGATGAAAG | GACCGATTCTCTGGGTCAGGGAGCGGTACTGA |
| | TACAAGCACAGCTTACATGGAGCTCTCGAGTT | TTTCACCCTGAAGATCTCTAGAGTTGAAGCCG |
| | TGAGGAGCGAGGATACTGCCGTGTACTATTGT | AGGACGTCGGTGTCTACTATTGCATGCAAGGG |
| | GCCAGAGATTGGTATTCCTCGAGCTGGTATAA | ACCCACTGGCCCGGCACGTTTGGCCAAGGGAC |
| | CGGAGATCGTGGGGATTGGTTCGACCCATGGG | AAAAGTGGAAATCAAG (SEQ ID NO: 588) |
| | GTCAGGGAACACTTGTAACTGTGTCCTCC | |
| | (SEQ ID NO: 587) | |
| TMPRSS4 | CAAGTGCAGCTCGTCCAGAGTGGTGCCGAAGT | GACATTGTTATGACACAATCACCATTGAGCCT |
| Ab4 | GAAAAAACCTGGGGCATCCGTAAAGGTGTCCT | CCCAGTGACTCCAGGCGAGCCCGCCTCCATCT |
| | GCAAGGCCTCAGGCTATTTTTTCACTACATAC | CGTGTCGAAGTTCCCAGTCCCTTCTGCACAGC |
| | TACTTACATTGGGTTCGGCAGGCTCCCGGGCA | AACGGCTATAACTACTTAGACTGGTACTTGCA |
| | GGGCCTGGAATGGATGGGCGTCATAAATCCGA | GAAGCCCGGCCAGAGTCCTCAGCTCCTAATCT |
| | ATAGTCGCCTGACTAGCTACGCAGAATCCTTT | ACGCAGCGAGCACGCTCCAGTCAGGCGTGCCC |
| | CAGGGAAGGGTCACAATGACTAGAGATACCAG | GATAGGTTTTCTGGCAGCGGGTCTGGGACCGA |
| | CACATCTACCGTCTATATGGAGCTGAGCAGTC | TTTCACGCTGAAGATTTCTCGGGTTGAAGCTG |
| | TGCGTAGCGAGGACACCGCTGTGTACTATTGT | AGGACGTGGGCGTCTACTATTGCATGCAAGGG |
| | GAGAGAGAAATGTTCCCATCGAGCTATGGGAT | ACCCACTGGCCTCCTACCTTCGGCCAAGGGAC |
| | TGATGTGTGGGGTCAGGGAACCACGGTGACAG | AAAACTTGAGATCAAG (SEQ ID NO: 590) |
| | TTTCAAGC (SEQ ID NO: 589) | |
| TMPRSS4 | CAAGTGCAACTGGTTCAGTCTGGGGCGGAAGT | GAGATTGTTATGACACAGTCGCCAGCAACCCT |
| Ab5 | CAAGAAGCCAGGCTCTAGCGTAAAAGTCTCGT | GAGTGTCAGCCCGGGCGAGAGGGCAACCCTCA |
| | GCAAAGCCTCCGGGTACACTTTTACGAGCTAT | GTTGTAGAGCTTCTCAGAGCGTGTCCTCCAAC |
| | TACATGCATTGGGTGCGGCAGGCTCCCGGGCA | CTAGCATGGTATCAACAGAAGCCCGGCCAGGC |
| | GGGCCTGGAATGGATGGGTCGGATCATTCCTA | ACCCAGGTTGCTCATCTACGGCGCCTCAACAA |
| | TCCTGGGCGCCACCGATTATGCACAGAAATTC | GAGCCACCGGGATTCCTGCCCGTTTCTCTGGG |
| | CAAGGGCGCGTAACTATAACTGCCGACGAGAG | AGCGGGAGCGGGACAGAGTTTACGCTTACAAT |
| | CACATCAACCGCCTACATGGAGCTCAGCTCCC | AAGTAGTTTACAGTCAGAAGATTTCGCTGTGT |
| | TGCGATCCGAGGACACCGCTGTGTACTATTGC | ACTATTGTCAACAGTACTACTCTCCTTTCCCA |
| | GCCAGGGCTGGCTATTCCTCCATCGCCGCGCG | TTGACTTTTGGTGGCGGCACAAAGGTGGAAAT |
| | CCCGGCTTTTTGGGGTCAGGGAACTCTTGTTA | CAAG (SEQ ID NO: 592) |
| | CCGTGTCTAGT (SEQ ID NO: 591) | |
| TMPRSS4 | CAAGTGCAGCTCGTCCAGTCTGGAGCCGAAGT | GACATTGTCATGACTCAGTCTCCCGATAGTCT |
| Ab6 | GAAAAAACCTGGGGCGTCTGTAAAAGTGTCCT | TGCTGTGTCCCTGGGAGAAAGGGCAACAATTA |
| | GCAAGGCCTCCGGCTATACTTTCACGAGCTAT | ATTGTAAGTCCTCCCAGTCTGTGCTGTACTCC |
| | TACATGCATTGGGTGCGGCAGGCACCAGGACA | AGCAACAACAAAAATTACTTGGCATGGTATCA |
| | AGGGTTGGAGTGGCTCGGGATAATCAACCCAT | GCAAAAGCCCGGTCAGCCGCCCAAACTGCTGA |
| | CAGATTACACCACAAGCTACGCGCAGAAGTTT | TCTACTGGGCTTCAACCCGGGAAAGCGGCGTG |
| | CAGGGCCGCGTCACCATGACCAGGGATACTTC | CCTGATCGTTTCAGCGGGAGCGGGTCTGGGAC |
| | TACAAGCACCGTCTACATGGAACTCTCGAGTC | AGACTTTACACTGACCATATCCAGCTTACAGG |
| | TAAGAAGTGAGGATACTGCTGTGTATTACTGC | CTGAGGACGTTGCCATCTACTATTGTCAACAA |
| | GCCCGAGTGGCCTCTTCATCCTGGTATCCAGG | TACTATGCCATTCCTTGGACTTTCGGGCAGGG |
| | CGACGAGAATTGGTATTTTGACCTGTGGGGCA | AACGAAGGTTGAAATCAAG (SEQ ID NO: 594) |
| | GAGGCACACTTGTCACCGTTAGCTCA (SEQ | |
| | ID NO: 593) | |
| TMPRSS4 | CAGGTCCAGCTTGTCCAGTCCGGCGCCGAAGT | GAAATTGTGATGACTCAGAGTCCTGCTACTCT |
| Ab7 | CAAAAAACCCGGCGCGAGTGTCAAAGTGTCCT | GAGTGTGTCTCCTGGTGAGAGGGCAACCCTCA |
| | GCAAGGCCTCCGGCTATACTTTTTCCCGGTAC | GTTGTAGAGCTTCGCAGAGAGTATCTAACAAC |
| | TTCATGCATTGGGTGCGGCAGGCACCAGGCCA | TATCTCGCATGGTATCAGCAAAAGCCCGGGCA |
| | AGGGTTGGAGTGGGTTGGCTGGATTAATCCCA | GGCTCCTAGGCTGCTTATCTACGGCGCGTCAA |
| | ACTCCGGGAATACCGGCTATGCCCAAAAGTTT | CCCGGGCCTCTGGCATTCCGGCCCGTTTTTCT |
| | CAGGGCCGCGTAACCATGACTCGAGATACATC | GGGAGCGGATCAGGGACTGAGTTCACACTAAC |
| | TACATCCACTGTCTACATGGAGCTGTCTAGCC | AATATCCAGCTTACAGAGCGAGGACTTCGCCG |
| | TGCGCAGCGAAGACACCGCAGTGTACTATTGC | TGTACTATTGTCAACAGTACGGGAGCACACCA |
| | GCTAGGGTTGTTACCGGTGGCAGACTGGATGT | TACACCTTCGGCCAAGGGACGAAGGTTGAAAT |
| | GTGGGGACAAGGCACAACCGTGACAGTGTCAA | CAAG (SEQ ID NO: 596) |
| | GC (SEQ ID NO: 595) | |
| TMPRSS4 | CAAGTACAGTTGGTCCAGAGCGGCGCAGAAGT | GACATTCAGATGACTCAGTCGCCCTCTTCACT |
| Ab8 | CAAGAAGCCTGGGGCGTCAGTGAAAGTGTCCT | GTCAGCTTCGGTTGGGGATAGAGTTACTATTA |
| | GCAAAGCCTCCGGGTATCGGTTCACAAGCCAG | CATGCCGAGCCTCTCAGAGTATCTCCTCCTGG |
| | TACATGCATTGGGTCCGGCAGGCGCCAGGCCA | CTGGCCTGGTATCAGCAAAAGCCGGGCAAAGC |
| | GGGTTTGGAGTGGATGGGGATAATTAATCCTA | ACCCAAGCTGCTGATCTACGGAGCCAGTTCCC |
| | GCGGCGGTAGTACGAGTTACGCGCAGAAGTTC | TACAGAGCGGAGTGCCCTCTCGCTTCAGCGGG |
| | CAGGGCCGCGTTACCATGACTCGTGACACCTC | AGTGGCTCTGGGACCGACTTCACACTTACAAT |
| | TACCAGCACCGTCTACATGGAACTCTCCTCCC | AAGCAGTTTACAGCCCGAAGATTTTGCAACGT |
| | TGAGGAGCGAGGATACCGCCGTGTATTACTGT | ATTATTGTCAACAAGCTAACTCATTTCCACCT |
| | GCTAGAGGCAGGATCGCTGTGGCAGGCCACCC | ACCTTTGGCGGAGGAACAAAAGTGGAGATCAA |
| | ACTCGGCTACTGGGGTCAAGGGACTCTTGTAA | G (SEQ ID NO: 598) |
| | CAGTGTCCAGT (SEQ ID NO: 597) | |
| TMPRSS4 | CAGGTCCAACTGGTCCAGTCTGGCGCCGAAGT | GACATTCAGATGACACAGAGTCCCAGTTCCTT |
| Ab9 | GAAAAAACCTGGAGCGTCCGTGAAGGTGTCCT | GTCGGCTTCAGTCGGTGATCGGGTGACTATAA |
| | GCAAGGCCTCCGGCTACACCTTCACCCGTTAT | CCTGTCAGGCCTCCCAGGATATTTCTAGGTTC |
| | TACATGCATTGGGTTCGCCAGGCACCCGGGCA | TTGCATTGGTATCAGCAAAAGCCTGGGAAAGC |
| | AGGGCTGGAATGGATGGGGTGGATTAATCCGA | ACCCAAGCTGCTGATCTACGGTGCAAGCAACC |
| | ACTCCGGCGGTACAAATTATGCTCAGAAATTT | TGAAATCTGGGGTGCCATCTAGATTCAGCGGC |
| | CAGGGAAGGGTGACGATGACTCGGGATACTAG | AGCGGGAGCGGGACCGACTTTACACTTACCAT |
| | CACAAGTACAGTTTACATGGAGCTCTCGAGCC | CTCAAGTTTACAACCAGAGGACTTCGCCACTT |
| | TACGATCAGAGGACACCGCCGTGTACTATTGT | ATTACTGCCAGCAGAGCTACTCTACACCTCCC |
| | GCTAGAGGCGGCTCATGGGGCAGCGGGCCACT | ACCTTTGGCGGTGGCACCAAGGTTGAAATCAA |
| | CGGCTATTGGGGACAAGGGACGCTTGTCACTG | G (SEQ ID NO: 600) |
| | TATCCTCC (SEQ ID NO: 599) | |
| TMPRSS4 | CAAGTGCAGCTTGTTCAGTCTGGAGCCGAGGT | GAAATTGTGATGACTCAGTCTCCTGCTACTCT |
| Ab10 | TAAAAAGCCCGGCGCGTCCGTTAAAGTGTCCT | GAGTGTATCACCTGGGGAAAGGGCAACTCTGA |
| | GCAAAGCCTCTGGCTACACCTTCACGAGCTAC | GTTGTAGAGCCTCGCAGAGCGTGTCCTCCTAT |
| | TACATGCATTGGGTCCGGCAGGCACCGGGCCA | CTGGCGTGGTACCAGCAGAAGCCCGGGCAGGC |
| | AGGGTTGGAGTGGATGGGGATTATTAATCCAT | ACCAAGGCTATTGATCTACGGAGCCAGCACTA |
| | CTGGTGCCGGGACCACATATGGGCACAACTTT | GAGCCACCGGGATACCCGCCCGTTTTTCTGGC |
| | CAGGGAAGAGTCACAATGACTCGAGACACCTC | AGCGGGTCAGGCACTGAGTTCACCTTAACCAT |
| | GACAAGCACCGTCTACATGGAACTCTCTAGCC | CTCCTCCCTGCAAAGTGAGGACTTCGCTGTCT |
| | TGCGCTCAGAGGACACGGCTGTGTACTATTGT | ATTACTGCCAGCAATATGGTAGCAGCCCAGGC |
| | GCTCGCGGCCCTAGGGATACCGCAATGGTGCG | ACGTTTGGCCAGGGTACAAAGCTCGAAATCAA |
| | GTTCGATTATTGGGGTCAGGGAACACTTGTAA | G (SEQ ID NO: 602) |
| | CAGTGTCCAGT (SEQ ID NO: 601) | |
| TMPRSS4 | CAGGTCCAGCTTGTCCAGTCTGGGGCGGAAGT | GACATTCAGATGACACAGAGTCCCTCATCACT |
| Ab11 | TAAAAAGCCTGGGGCTAGTGTAAAGGTGTCCT | GTCAGCCTCCGTTGGTGATAGAGTGACAATTA |
| | GCAAGGCCTCCGGCGGCACATTTAGCAATTAC | CGTGCCGTGCCTCTCAGTCCATCAACAACTAC |
| | GCAATCAGTTGGGTGCGGCAGGCTCCAGGTCA | TTAAACTGGTATCAGCAAAAACCGGGCAAAGC |
| | AGGGTTGGAGTGGGTGGGCCGGATTAATCCCA | ACCAAAACTGCTGATCTACGCGGCAAGCAGTC |
| | ACTCCGGCGGCACTAATTATGCTCAGAAGTTT | TCCAGTCTGGCGTGCCTAGCCGCTTTAGCGGG |
| | CAAGGGCGCGTTACCATGACCAGGGATACCAG | TCTGGTAGCGGCACTGATTTCACACTGACAAT |
| | CACTAGCACCGTCTACATGGAACTAAGCTCCC | AAGTAGCCTTCAGCCCGAGGACTTCGCCACCT |
| | TGAGGTCTGAGGACACTGCTGTCTACTATTGT | ATTACTGTCAACAGTCGTATTCCACAAAATGG |
| | GCCAGAGGACGATACTCCTCTTCGTCCTGGGG | ACTTTCGGGCAAGGGACGAAAGTGGAAATCAA |
| | TCAGGGAACCCTCGTGACCGTATCATCT (SEQ | G (SEQ ID NO: 604) |
| | ID NO: 603) | |
| TMPRSS4 | CAGGTTCAGCTTGTCCAGTCTGGGGCAGAAGT | GACATTCAGATGACTCAAAGCCCAAGCTCACT |
| Ab12 | CAAGAAGCCTGGCGCCTCCGTGAAAGTGTCGT | GTCAGCTAGTGTGGGCGATAGAGTGACGATTA |
| | GCAAGGCCTCCGGCTATACCTTCTCAAACTAC | CATGTAGGGCCTCCCAAGGGATCTCGCGCTGG |
| | TACATCCACTGGGTTCGACAGGCGCCCGGGCA | CTCGCGTGGTACCAGCAGAAGCCTGGGAAGGC |
| | GGGCTTGGAATGGATGGGCTGGATTAATCCGA | ACCCAAACTGCTGATCTACGGCGCCAGCAACC |
| | ACTCCGGTGATACAAATTATGCACAAAAATTC | TCCAGACTGGGGTGCCCTCTCGTTTTTCTGGA |
| | CAAGGGCGGGTAACAATGACCCGGGATACCAG | TCTGGTAGCGGCACTGACTTCACCCTGACAAT |
| | TACATCTACGGTCTACATGGAGCTAAGCAGCC | ATCCAGCTTACAGCCCGAGGACTTTGCCACCT |
| | TGCGCAGTGAAGATACCGCTGTGTACTATTGC | ATTATTGTCAACAGAGTTATAGCACTCCTCCA |
| | GCTAGAGGCATGACCTGGAGGACCTCTGCTGC | ACTTTTGGGCCAGGGACGAAAGTCGACATCAA |
| | CACATACTGGGGTCAGGGAACACTTGTTACTG | G (SEQ ID NO: 606) |
| | TGTCCTCC (SEQ ID NO: 605) | |
| TMPRSS4 | CAGGTTCAGTTGGTTCAGTCTGGGGCAGAAGT | GAGATTGTCATGACACAGTCTCCCGCTACTCT |
| Ab13 | TAAAAAGCCAGGCGCGAGCGTGAAAGTGTCTT | GAGTGTGTCGCCCGGCGAAAGGGCAACCCTGA |
| | GTAAGGCCTCCGGCTATACCTTCACCAATTAC | GTTGCAGAGCATCCCAGTCGGTGAACGGGAAT |
| | TACATGCATTGGGTCCGGCAGGCTCCTGGGCA | TATCTCGCCTGGTATCAGCAAAAACCGGGCCA |
| | AGGGTTGGAGTGGATGGGTTGGATAAGCGCCT | GGCTCCCAGGCTGTTAATCTACGGAGTCTCCT |
| | ACAACGGCAACACCAATTACGCTCAGAAACTG | CCCGGGCCAGCGGGATTCCTGCTCGTTTCAGC |
| | CAAGGGCGCGTGACGATGACAAGAGACACTTC | GGCTCCGGATCAGGCACTGAGTTCACACTAAC |
| | AACTTCAACCGTCTATATGGAACTGAGTAGCC | CATAAGTAGCCTTCAGTCTGAAGATTTTGCCG |
| | TCCGATCTGAGGACACCGCCGTGTACTATTGT | TGTACTATTGTCAACAGTATGGAAGCTCTCCA |
| | GCAACAGCCAGCGGTTGGGGACACAGTAACTC | TACACGTTTGGGCAGGGAACAAAGGTTGAGAT |
| | CGCGGGCTACTGGGGTCAAGGGACTCTTGTGA | CAAG (SEQ ID NO: 608) |
| | CAGTCTCTTCA (SEQ ID NO: 607) | |
| TMPRSS4 | GAAGTCCAACTGCTCGAGAGCGGCGGTGGGCT | GACATCCAAATGACACAGTCACCTTCATCCTT |
| Ab14 | GGTTCAGCCAGGCGGTAGTCTCCGGCTGTCCT | GTCCGCCTCTGTCGGCGATAGAGTGACGATTA |
| | GTGCTGCGAGTGGGTTCACCTTTTCCAATCAC | CATGTAGGGCAAGTCAGAGGATTAGCACTTAT |
| | TATATGAGCTGGGTGCGGCAGGCTCCGGGAAA | CTGAATTGGTACCAGCAGAAGCCCGGAAAAGC |
| | AGGCCTGGAGTGGGTATCAGCCATCTCCGGGT | ACCCAAACTGCTGATCTACTCCGCATCGACCC |
| | CTGGCGGCAGCACTTATTACGCCGATAGCGTT | TCCAGGCTGGGGTGCCATCTCGTTTTAGCGGG |
| | AAGGGTCGCTTCACCATTAGCCGGGACAACTC | TCTGGCTCAGGCACCGATTTCACGCTTACAAT |
| | CAAGAACACACTGTACTTGCAGATGAACTCAT | AAGTAGCCTCCAGCCCGAGGACTTTGCCACTT |
| | TACGCGCTGGGGATACCGCCGTGTACTATTGC | ATTACTGCCAACAGGCCTACTCTCTTCCTTGG |
| | GCGAGGGACCGATACAGATGGGGCAGAGGCTA | ACCTTCGGGCAGGGAACTAAGTTAGAAATCAA |
| | TTTTCAGCATTGGGGACAAGGGACTCTAGTAA | G (SEQ ID NO: 610) |
| | CAGTGTCCTCG (SEQ ID NO: 609) | |
| TMPRSS4 | CAGGTTCAGCTGGTCCAGTCGGGCGCCGAAGT | GACATACAGATGACCCAGTCGCCAAGCTCCTT |
| Ab15 | GAAGAAGCCTGGGGCGAGTGTTAAAGTGTCCT | GAGTGCTTCCGTCGGAGATAGAGTGACTATAA |
| | GCAAGGCCTCTGGCTACACTTTCACTCGTTAT | CCTGCCGAGCCTCTCAGTCAATCAATACCTGG |
| | TACATGCATTGGGTTCGGCAGGCACCTGGGCA | CTCGCCTGGTATCAGCAAAAGCCCGGCAAAGC |
| | AGGGCTGGAATGGATGGGGTGGATTAACCCGA | TCCCAAACTGCTGATCTACGCAGCAAGCAGTC |
| | ACTCCGGAGTGACCAATTTTGCTCAGAAGTTC | TCCAGAGCGGCGTGCCCTCACGCTTTTCTGGG |
| | CAAGGGCGCGTAACTATGACACGGGACACCAG | TCTGGGAGTGGTACAGATTTCACCCTTACAAT |
| | TACATCAACCGTCTACATGGAGCTGTCCAGCC | TAGCAGCTTGCAGCCAGAGGATTTTGCCACGT |
| | TAAGGAGCGAAGACACTGCTGTGTACTATTGT | ATTATTGTCAACAGGCCATCTCCTTTCCCTTA |
| | GCGAGGGTCAGAATTGGCTGGCTCCAGTCACC | ACCTTCGGCGGCGGGACAAAAGTGGAGATCAA |
| | TCCACTGTACTGGGGACAAGGAACGCTTGTGA | G (SEQ ID NO: 612) |
| | CAGTATCCAGC (SEQ ID NO: 611) | |
| TMPRSS4 | CAGGTCCAGCTCGTACAGTCCGGCGCGGAGGT | GACATTCAGATGACCCAGTCTCCATCATCACT |
| Ab16 | TAAAAAGCCTGGTGCAAGTGTAAAAGTTTCCT | GTCAGCTTCTGTGGGCGATAGAGTGACAATAA |
| | GCAAGGCCTCCGGTTACACTTTCTCACGGCAC | CATGCAGGGCCTCCCAGTCGATCAATCGCTGG |
| | TACATGCATTGGGTCCGGCAGGCACCCGGGCA | CTCGCGTGGTATCAACAGAAGCCCGGGAAAGC |
| | GGGCTTGGAATGGATGGGGCGCATTAATCCGA | ACCAAAGCTGCTGATTTACGGCGCCAGCAACC |
| | ACTCCGGCGGTACTAATTACGCTCAGAAATTT | TACAGAGCGGCGTGCCTAGTCGTTTTAGCGGT |
| | CAAGGGCGAGTTACCATGACAAGGGATACCTC | TCAGGGTCTGGAACCGACTTCACGTTGACAAT |
| | TACTTCCACCGTGTATATGGAACTGAGTAGCC | AAGCAGTTTACAGCCCGAGGACTTTGCCACCT |
| | TTAGGAGCGAGGACACCGCTGTGTACTATTGT | ATTATTGTCAACAGGCTAACTCCTTCCCATAC |
| | GCCAGAAGCATCTACGGCGATTATTGGTTTGA | ACTTTCGGGCAAGGCACTAAGCTGGAAATCAA |
| | TCCTTGGGGACAAGGGACACTTGTCACAGTGT | G (SEQ ID NO: 614) |
| | CTAGT (SEQ ID NO: 613) | |
| TMPRSS4 | CAAGTGCAGCTTGTTCAGTCCGGCGCTGAAGT | GACATTCAGATGACCCAGTCTCCAAGCAGCCT |
| Ab17 | GAAAAAACCCGGCGCATCAGTTAAAGTGTCCT | GAGTGCCTCGGTTGGGGACAGAGTGACTATTA |
| | GCAAGGCCTCCGGCTATACTTTCACATCGTAT | CCTGTCGCGCTAGTCAGGGAATCTCCTCCTAC |
| | TACATCCACTGGGTCCGGCAGGCTCCTGGGCA | CTGAACTGGTATCAACAGAAGCCCGGGAAGGC |
| | GGGACTAGAGTGGATGGGGTGGATGAGCCCTA | ACCCAAACTCTTGATTTACGCGGCGAGTAGAC |
| | ATAGCGGCGATACCGGTTACGCCCAAAAGTTT | TCCAAAGCGGAGTGCCGAGCAGGTTTTCCGGG |
| | CAGGGCCGCGTAACCATGACCAGGGACACATC | AGCGGGTCTGGCACCGATTTCACACTGACAAT |
| | TACATCCACCGTCTACATGGAGCTTAGCTCTT | AAGTAGTTTACAGCCAGAGGACTTCGCAACTT |
| | TGCGATCCGAAGATACGGCTGTGTACTATTGC | ACTATTGTCAACAGTCTTATAGAAGCCCTCCA |
| | GCCCGGCTCGTCCGTGGCGGGTTTGATTACTG | ACTTTCGGGCAGGGAACTAAGCTGGAAATCAA |
| | GGGTCAGGGAACGCTGGTAACAGTGTCAAGT | G (SEQ ID NO: 616) |
| | (SEQ ID NO: 615) | |
| TMPRSS4 | CAGGTCCAGCTCGTACAGAGTGGCGCCGAAGT | GACATTGTGATGACACAGAGTCCGGACAGCCT |
| Ab18 | CAAGAAGCCTGGAGCTTCCGTCAAAGTGTCCT | TGCTGTGTCTCTCGGTGAACGCGCGACCATCA |
| | GCAAAGCCAGCGGCTATACTTTCACGTCCTCA | ACTGCAAGTCCTCCCAGTCGGTGCTGTACTCA |
| | GGAATTAATTGGGTTCGGCAGGCACCCGGGCA | AGCAACAACAAGAATTACCTGGCCTGGTATCA |
| | GGGCTTGGAGTGGATGGGGTGGATTAATCCCA | ACAGAAACCGGGCCAGCCTCCAAAGCTGCTGA |
| | ACTCCGGCGGCGCAAAATATGCCCAACGCTTC | TCTACTGGGCTAGTACCAGGGAGTCTGGGGTG |
| | CAGGGACGGGTTACTATGACCCGAGATACCAG | CCTGATCGTTTCTCCGGTAGCGGCTCCGGGAC |
| | CACCTCTACTGTCTACATGGAGCTGAGCAGCC | AGACTTCACCCTAACTATAAGCAGTTTACAAG |
| | TTAGGAGTGAAGATACCGCTGTGTACTATTGC | CAGAGGACGTGGCCGTATATCACTGTCAACAG |
| | GCCAGGGCGAGAGGGTATTCTGGCTCGAAAAG | TACTACAATACACCATTTACGTTTGGACCAGG |
| | AGATTTTCAGCATTGGGGACAAGGGACATTGG | GACAAAAGTGGACATCAAG (SEQ ID NO: 618) |
| | TTACAGTCTCATCA (SEQ ID NO: 617) | |
| TMPRSS4 | CAAGTGCAGTTGGTTCAGTCTGGAGCCGAAGT | GATATTCAGATGACCCAGTCGCCAAGTTCCTT |
| Ab19 | GAAGAAGCCTGGGGCGAGCGTCAAAGTGTCCT | GTCCGCTTCCGTAGGCGACCGCGTGACTATAA |
| | GCAAGGCCTCCGGCTACACTTTTAACCGGAAA | CTTGCAGGGCCTCTCAAAGTATCTCGAGATAC |
| | TTCATGCATTGGGTTCGGCAGGCACCCGGTCA | CTGAATTGGTACCAGCAGAAGCCAGGGAAAGC |
| | AGGGCTGGAATGGATGGGCTGGATGAACCCGA | TCCAAAACTGCTGATCTACGGAGCGAGCAATC |
| | ACAACGGTGCAACTAATTATGCACAGAAGTTC | TCCAGAGCGGCGTGCCGAGTCGTTTTAGCGGC |
| | CAGGGCCGCGTGACAATGACACGAGATACCAG | AGCGGGTCTGGGACAGACTTCACGCTGACAAT |
| | CACTTCAACCGTCTACATGGAGCTCTCTTCCC | AAGTAGCTTACAGCCCGAGGATTTTGCTACGT |
| | TAAGGAGCGAAGATACCGCCGTCTACTATTGT | ATTACTGTCAACAGAGTTACTCCACACCTCCC |
| | GCTAGAGGAAGAGGCTATTATGGTTCTGGTTC | ACCTTCGGCCCTGGGACGAAAGTGGACATCAA |
| | ATACTATGGGGACTATTGGGGACAAGGGACCC | G (SEQ ID NO: 620) |
| | TTGTAACAGTCTCCTCT (SEQ ID NO: 619) | |
| TMPRSS4 | CAAGTGCAGCTGGTGCAGAGTGGCGCGGAGGT | GACATTCAGATGACCCAGTCGCCCTCTTCACT |
| Ab20 | CAAAAAGCCTGGGGCGTCCGTGAAAGTGTCCT | GTCCGCCTCAGTTGGGGACAGAGTAACCATTA |
| | GCAAGGCCTCCGGATACACCTTCACCCGATAT | CCTGTAGGGCCTCTCAGAATATCGCCACATAC |
| | TACATGCATTGGGTTCGGCAGGCACCAGGCCA | CTGAGCTGGTATCAGCAAAAGCCTGGCAAAGC |
| | AGGGCTCGAATGGATGGGGTGGATGAATCCCA | TCCAAAGCTGCTGATCTACGGTGCAAGCGCCC |
| | ACTCCGGGAATGCAGGCTATGCTCAGAAACTG | TCCGGTCTGGAGTCCCTAGCCGTTTTTCTGGG |
| | CAAGGCCGCGTGACTATGACTCGCGACACCTC | TCCGGGAGCGGGACAGATTTCACTCTCACAAT |
| | CACCTCAACTGTCTACATGGAGCTAAGTAGCT | ATCTAGCTTACAGCCGGAAGATTTCGCTACTT |
| | TGAGGTCTGAGGACACCGCTGTGTATTACTGT | ATTACTGCCTTCAGCACAACACATATCCCTTG |
| | GCCAGAGGCTACAACTGGTTTGATCCATGGGG | ACATTTGGCGGAGGCACGAAGGTTGAAATCAA |
| | TCAGGGAACACTTGTAACAGTGTCAAGT (SEQ | G (SEQ ID NO: 622) |
| | ID NO: 621) | |
| TMPRSS4 | CAGGTTCAACTGGTCCAGTCAGGCGCTGAAGT | GACATTCAGATGACTCAGAGTCCAAGCAGTTT |
| Ab21 | GAAGAAGCCTGGCGCCTCTGTGAAAGTGTCCT | GAGTGCTTCTGTGGGCGACAGAGTAACTATTA |
| | GCAAAGCCTCCGGTTATAGTTTCTCTGGCTAC | CATGCAGGGCCTCCCAGTCAATCTCTCGCTAT |
| | TATCTGCATTGGGTTAGGCAGGCACCTGGGCA | CTCAACTGGTATCAGCAAAAACCCGGCAAGGC |
| | GGGCCTGGAATGGATGGGGTGGATGAATCCCG | ACCGAAGTTACTGATCTACGCAGCGAGCACGC |
| | ATTCTGGGAATACTGGCTACGCGCAAAACTTT | TACAGAGCGGAGTGCCATCAAGATTTAGCGGC |
| | CAGGGACGGGTTACAATGACCCGAGATACTTC | AGCGGGTCCGGGACCGATTTCACCCTTACGAT |
| | CACCTCAACCGTCTACATGGAACTCTCCTCTC | AAGCAGCTTGCAACCTGAGGACTTCGCCACCT |
| | TGCGGAGCGAGGACACCGCCGTGTACTATTGT | ACTATTGTCAACAGTCTTACTCCACACCCGTG |
| | GCTCGCCTGCACCGTGGCGGGCACGATTACTG | ACATTTGGGCAGGGAACACGGCTCGAGATCAA |
| | GGGTCAGGGAACACTTGTCACTGTATCGAGT | G (SEQ ID NO: 624) |
| | (SEQ ID NO: 623) | |
| TMPRSS4 | CAGGTTCAGCTGGTCCAGTCTGGCGCCGAAGT | GACATTCAGATGACTCAGAGTCCAAGTTCACT |
| Ab22 | TAAAAAACCTGGCGCGAGCGTGAAAGTGTCCT | GTCAGCTTCCGTGGGTGACAGAGTGACGATAA |
| | GCAAGGCCTCCGGTTACACATTCACTTCATAT | CATGTAGGGCCGGGCAGAACATCAAGCGATAC |
| | TACATGCATTGGGTGCGGCAGGCTCCTGGGCA | CTCAACTGGTACCAGCAGAAACCTGGGAAGGC |
| | AGGGTTGGAGTGGATGGGGCGGATTAATCCGC | ACCCAAACTGCTGATATATGCAGCGAGCAGCC |
| | ACTCTGGCGACGCCGATTTCGTCGATAAGTTT | TCCAGTCTGGGGTACCCTCTCGTTTCAGCGGC |
| | CAAGGGCGCGTGACTATGACCAGGGATACTAG | TCTGGGTCCGGCACCGATTTTACGCTCACAAT |
| | CACCAGCACCGTCTACATGGAGCTATCAAGTT | CAGTTCCCTGCAACCAGAGGACTTTGCTACAT |
| | TGCGCTCCGAAGATACCGCAGTGTACTATTGC | ACTATTGTCAACAGTCGTACAGCTCGCCCTTA |
| | GCCAGGGACAGAAGAGGATATGGCGGCAATAG | ACCTTCGGAGGCGGCACCAAAGTCGAAATCAA |
| | CCTTGACTATTGGGGACAAGGGACACTTGTAA | G (SEQ ID NO: 626) |
| | CTGTTAGTTCT (SEQ ID NO: 625) | |
| TMPRSS4 | CAGGTTCAGTTGGTACAATCAGGAGCAGAAGT | GAAATCGTGATGACTCAGAGTCCCGCCACACT |
| Ab23 | GAAAAAGCCTGGAGCCTCAGTGAAGGTGTCCT | GAGTGTCAGCCCGGGCGAGCGGGCAACACTGA |
| | GCAAAGCCTCCGGCTATACATTCACCCGGAAT | GTTGCAGAGCCTCCCAGTCTGTCGGCAACTAT |
| | TACCTCCATTGGGTTCGGCAGGCTCCTGGCCA | CTAGCTTGGTATCAGCAAAAGCCTGGGCAGGC |
| | GGGCCTGGAGTGGATGGGGATTATTAATCCCA | TCCAAGGCTGCTTATTTACGGCGCGAGCACTA |
| | GTGGCGGCAGCACCACTTACGCCCAGAAGTTC | GAGCAACTGGGATACCAGCGCGTTTTTCTGGG |
| | CAAGGCCGCGTAACAATGACCCGAGATACATC | TCTGGGTCTGGGACTGAGTTTACCCTTACCAT |
| | AACTTCCACCGTCTACATGGAACTCTCCAGCC | CAGCTCGTTACAGTCTGAGGACTTCGCAGTGT |
| | TGAGGAGCGAGGACACGGCTGTGTACTATTGT | ACTATTGTCAACAGTACCACTCTAGCCCACCA |
| | GCCCGCGGCAGGACATGGTTCAGATCAGGCAT | TATACGTTTGGGCAGGGTACGAAAGTCGAAAT |
| | GGATGTGTGGGGTCAAGGGACCACCGTTACAG | CAAG (SEQ ID NO: 628) |
| | TGTCCTCC (SEQ ID NO: 627) | |
| TMPRSS4 | CAAGTGCAGCTGGTCCAGTCAGGCGCGGAAGT | GACATTCAGATGACCCAGTCTCCCTCGTCCTT |
| Ab24 | CAAAAAATCTGGCGCGAGCGTTAAGGTGTCCT | GTCAGCCAGCGTGGGTGATCGCGTTACCATTA |
| | GCAAGGCCTCCGGTTACACCTTTACGTCCTAT | CCTGTAGGGCTAGTCAGAGTATCTCCTCCTGG |
| | TACATGCATTGGGTCCGGCAGGCACCTGGGCA | CTCGCTTGGTATCAGCAAAAGCCCGGCAAAGC |
| | GGGCCTGGAGTGGATGGGCGTTATAAATCCCT | TCCTAAGCTGCTGATCTACGCAGCCTCAACTT |
| | CTGGCGGCACTACAAGCTACGCCCAGAAGTTT | TGCAGTCCGGCGTACCGAGTCGTTTTTCTGGG |
| | CAAGGGCGGGTGACAATGACTCGAGAGACAAG | AGCGGGAGCGGGACCGACTTCACGCTAACTAT |
| | CACTAGCACCGTCTACATGGAACTCAGCTCGC | TAGTAGCTTACAGCCAGAGGACTTCGCCACTT |
| | TGCGCTCAGAAGATACCGCCGTGTATTACTGC | ATTATTGTCAACAGTCATACAACACGCCATAC |
| | GCAAGAGGAAGAGGGTGGCTGAGGTCTGCTCT | ACATTCGGGCAAGGCACAAAACTTGAGATCAA |
| | CGGCTATTGGGGTCAGGGTACACTTGTAACCG | G (SEQ ID NO: 630) |
| | TGTCCTCC (SEQ ID NO: 629) | |
| TMPRSS4 | CAGGTCCAGTTAGTGCAGTCTGGGGCGGAGGT | GAAATCGTGATGACACAGAGCCCTGCTACCCT |
| Ab25 | GAAAAAGCCAGGAGCGAGCGTGAAAGTGTCCT | GAGTGTTAGCCCTGGGGAAAGGGCTACCCTCT |
| | GCAAAGCCTCCGGCGGGCGATTTTCAACATAC | CGTGTAGAGCCTCACAATCTGTCTCCTCCAAT |
| | GCCCTGTCATGGGTTCGGCAAGCACCCGGCCA | TATCTCGCCTGGTATCAACAGAAGCCCGGGCA |
| | GGGCCTGGAGTGGATGGGGTGGATTAACCCGA | GGCTCCCAGGTTGCTTATCTACGGGATTTCAA |
| | ACTCCGGCGGCACAAATTACGCCCAGAAATTC | CTAGAGCATCGGGTATTCCCGCTAGATTTTCT |
| | CAGGGCCGCGTAACTATGACTCGAGACACCTC | GGTTCTGGCAGCGGGACCGAGTTTACCCTTAC |
| | AACTTCCACCGTCTACATGGAGCTAAGCTCTC | GATAAGTAGCCTCCAGAGCGAGGATTTCGCAG |
| | TGAGGAGTGAAGACACAGCAGTGTACTATTGC | TGTACTATTGTCAACAGCGCTCTAACTGGCCA |
| | GCCAAGTCCTTGTGGTGGAGTCCAAGCCACTA | CCTAGCATAACGTTCGGGCAGGGAACTCGTCT |
| | CTATTACTATGGGATGGATGTGTGGGGTCAAG | GGAAATCAAG (SEQ ID NO: 632) |
| | GCACCACAGTCACAGTTTCCAGC (SEQ ID | |
| | NO: 631) | |
| TMPRSS4 | GAGGTTCAACTGCTCGAGTCTGGCGGCGGGCT | GACATTCAGATGACACAGTCTCCTAGTTCACT |
| Ab26 | TGTTCAGCCCGGCGGTTCTTTGAGGTTGTCAT | GTCAGCCAGCGTCGGTGATAGAGTTACAATAA |
| | GTGCCGCGTCTGGGTTTACCTTCTCCTCCTAT | CTTGTAGGGCCTCGCAGAATGTAGGAAGCTGG |
| | GCCATGCATTGGGTGCGGCAGGCTCCTGGCAA | CTCGCATGGTATCAACAGAAGCCAGGGAAAGC |
| | GGGCCTGGAGTGGGTGGCTGTCATCTGGTACG | TCCCAAGCTGCTGATCTACGCAGCAAGCAGCC |
| | ACGGGAGCAGCAAATACTACGCCGATTCCGTG | TCCAGAGCGGCGTACCATCGAGGTTTTCCGGC |
| | AAAGGCCGCTTCACCATTTCTCGAGACAACTC | AGCGGAAGTGGCACCGACTTCACCTTAACTAT |
| | AAAGAATACGCTGTACCTCCAGATGAACTCCC | TAGATCTCTACAGCCGGAAGATTTTGCCACCT |
| | TGCGCGCAGAAGATACCGCTGTGTACTATTGC | ATTACTGCCAACAGAGTTATTCCACTCCCATC |
| | GCGCGTGGGGAAGTGCGGAGAGGGTTCCAGCA | ACGTTTGGGCAAGGCACTCGGTTAGAGATCAA |
| | CTGGGGTCAGGGAACACTTGTCACAGTGTCCT | G (SEQ ID NO: 634) |
| | CC (SEQ ID NO: 633) | |
| TMPRSS4 | CAGGTTCAGCTGGTCCAGTCTGGCGCCGAAGT | GACATTCAGATGACACAGAGCCCTTCTTCACT |
| Ab27 | GAAGAAGCCCGGCGCATCCGTCAAAGTGTCGT | GTCAGCTTCTGTGGGCGATAGAGTGACTATTA |
| | GCAAGGCCTCCGGATATACATTTTCCCGCTAC | CCTGTCGTGCCAGTCAGTCAATCAGCACTTGG |
| | TACATGCATTGGGTTCGGCAGGCTCCTGGCCA | CTCGCTTGGTATCAGCAAAAGCCAGGGAAAGC |
| | AGGGTTGGAATGGATGGGGTGGATGAATCCGA | GCCCAAACTGCTGATCTACGCAGCGAGTAGTC |
| | ACTCCGGCGATACTGGTTATGCACAGAAATTC | TCCAGTCTGGCGTGCCCTCTCGCTTTTCGGGC |
| | CAAGGGAGGGTAACAATGACCCGCGACACCAG | TCCGGGTCCGGCACCGATTTCACCCTTACAAT |
| | CACATCTACGGTCTACATGGAACTCTCCTCAC | TTCAAGCCTACAGCCAGAGGACTTTGCCACCT |
| | TGCGAAGCGAGGATACTGCCGTGTATTACTGC | ATTACTGTCAACAGTTAAGCTCCTACCCATTG |
| | GCTAAGGGAAGGGAGTGGCTGAGATCTCCTTT | ACATTCGGGCAAGGGACAAAAGTAGAGATCAA |
| | CGACTATTGGGGTCAAGGGACTCTTGTGACCG | G (SEQ ID NO: 636) |
| | TTAGCAGC (SEQ ID NO: 635) | |
| TMPRSS4 | CAGGTTCAACTGGTACAGAGCGGCGCCGAAGT | GACATCCAGATGACCCAGTCACCCTCTTCACT |
| Ab28 | GAAAAAACCCGGCGCGAGCGTGAAAGTGTCCT | GTCAGCCAGCGTAGGCGATAGAGTCACTATTA |
| | GCAAGGCCTCCGGCTACACCTTCACTGGATAT | CCTGTAGGGCTTCGCAAGGGATTGGAAACTAT |
| | TACATGCATTGGGTCCGGCAGGCTCCCGGGCA | TTGGCTTGGTATCAACAGAAGCCCGGGAAGGC |
| | GGGCCTGGAGTGGATGGGATGGATGAATCCAA | ACCTAAACTGCTGATCTACGCAGCAAGCAGCT |
| | ACTCCGGAAATACCGGTTACGCCCAGAAATTC | TAGAAAGCGGAGTGCCGAGTCGCTTTAGCGGG |
| | CAGGGACGAGTTACAATGACTCGTGATACATC | TCCGGGTCTGGCACAGATTTCACGCTTACAAT |
| | CACTAGCACCGTCTACATGGAACTCTCTTCTC | AAGTAGTTTGCAGCCAGAGGATTTTGCCACGT |
| | TACGCTCCGAGGACACCGCAGTGTACTATTGC | ACTATTGTCAACAGGGCTACCGGTTCCCACCT |
| | GCTAGGCTCAGAGCGAAGGGCGGCGGTTTTGA | ACCTTTGGGCCTGGGACAAAGGTGGACATCAA |
| | CTATTGGGGTCAGGGTACACTTGTTACTGTGT | G (SEQ ID NO: 638) |
| | CAAGT (SEQ ID NO: 637) | |
| TMPRSS4 | CAGGTTCAGCTCGTACAATCTGGGGCAGAAGT | GACATTGTCATGACGCAGAGTCCGTTGTCCCT |
| Ab29 | GAAAAAGCCCGGCGCCAGCGTTAAGGTGTCCT | GCCCGTGACACCTGGGGAACCAGCGTCCATAT |
| | GCAAAGCCAGCGGCTATACCTTTGCAAATTAC | CTTGTAGATCATCACAGTCCCTCCTCCATTCG |
| | AACATCCACTGGGTGCGGCAAGCACCTGGGCA | AACGGCTACAACTACTTAGATTGGTACTTGCA |
| | GGGCCTGGAGTGGATGGGGTGGATGAATCCAA | GAAGCCCGGGCAATCGCCTCAGCTCCTGATCT |
| | ACTCCGGCAATACCGGTTACGCTCAGAAATTT | ACTTAGGATCTAATAGGGCCTCTGGAGTGCCA |
| | CAAGGACGGGTGACCATGACCAGGGACACTAG | GATCGCTTCTCAGGCAGCGGGAGCGGCACAGA |
| | CACATCAACTGTGTACATGGAGCTAAGCAGTC | TTTCACGCTGAAAATTAGTCGTGTTGAGGCCG |
| | TGCGAAGCGAAGATACCGCTGTCTACTATTGC | AAGACGTAGGCGTCTACTATTGTATGCAGAGC |
| | GCTCGCCCACGATATTCATCTGGGTGGTATGG | ACTTATTGGCCTCCAACTTTCGGGCAGGGAAC |
| | GTGGTATTTTGACCTGTGGGGCAGAGGTACAC | AAAGCTTGAGATCAAG (SEQ ID NO: 640) |
| | TTGTAACAGTGTCCAGT (SEQ ID NO: 639) | |
| TMPRSS4 | CAGGTTCAACTGGTCCAGTCGGGTGCCGAGGT | GAAATTGTTATGACTCAGAGTCCTGCCACCCT |
| Ab30 | GAAAAAGCCCGGAGCGTCAGTGAAAGTGTCCT | GAGTGTAAGTCCTGGGGAGAGGGCAACTCTGA |
| | GCAAGGCTTCTGGCTATACATTCACGACTTAT | GTTGTAGAGCCTCCCAGTCTGTGGGCAGATAT |
| | TACATGCATTGGGTGCGGCAGGCACCAGGCCA | TTGGCCTGGTACCAGCAGAAGCCTGGGCAGGC |
| | AGGGCTAGAATGGATGGGGTGGATGAATCCGA | TCCCAGGCTCCTCATCTACGGCGCGTCCACCA |
| | ACTCCGGAAACACAGGCTACGCCCAGAAGTTC | GAGCAACCGGGATTCCAGCTCGTTTTTCAGGC |
| | CAAGGGCGGGTAACAATGACCCGAGATACCAG | AGCGGCTCTGGCACAGAGTTCACGTTGACTAT |
| | CACCAGCACGGTCTACATGGAGCTCTCCTCAC | AAGCAGCTTACAGTCTGAGGACTTCGCCGTCT |
| | TGCGCTCCGAAGATACCGCAGTGTACTATTGT | ATTACTGCCAGCACTATGACAGCTCACCCATG |
| | GCCCGCGCTAGGACCTGGCTGCTGTCTCCATT | TACACTTTTGGGCAGGGAACAAAACTTGAAAT |
| | TGACTATTGGGGACAAGGGACTCTTGTGACCG | CAAG (SEQ ID NO: 642) |
| | TTAGTAGC (SEQ ID NO: 641) | |
| TMPRSS4 | CAGGTCCAGCTGGTGCAGTCTGGGGCAGAAGT | GAAATAGTTATGACTCAGTCGCCTGCCACACT |
| Ab31 | GAAAAAACCCGGAAGCAGCGTAAAGGTGTCCT | GAGTGTCTCGCCCGGCGAAAGGGCTACACTGT |
| | GCAAGGCCTCCGGTTACACCTTCCGCGGGTCT | CTTGCAGAGCCTCCCAAAGCGTTAGATCATAC |
| | GGCATCTCCTGGGTCCGGCAAGCTCCTGGGCA | CTGGCATGGTATCAGCAAAAACCTGGCCAGGC |
| | AGGGTTGGAGTGGATGGGGATTATCTACCCAG | TCCAAGGCTGCTCATATACGGCGCCTCAACCA |
| | CTGACAGCGAGACACGCTACAGCCCGAGTTTT | GAGCCACCGGCATTCCAGCCCGTTTTTCAGGG |
| | CAGGGCCGAGTGACCATTACCGCGGATGAGTC | AGTGGTAGCGGGACCGAGTTCACTCTTACGAT |
| | TACTTCAACTGCCTATATGGAACTCTCTAGTC | CAGCTCCCTACAGAGCGAGGACTTCGCAGTGT |
| | TCCGGTCCGAGGACACTGCGGTGTACTATTGT | ATTACTGTCAACAGCACGGCAGTTTGCCCTTA |
| | GCAAGGGAGAGTTCCTCCTGGGATTATTTCGA | |
| | TTATTGGGGACAAGGAACACTTGTAACAGTGT | ACCTTTGGTCAAGGGACGAAAGTCGAAATCAA |
| | CAAGC (SEQ ID NO: 643) | G (SEQ ID NO: 644) |
| TMPRSS4 | CAGGTTCAGTTGGTGCAGAGCGGCGCGGAGGT | GACATTCAGATGACCCAATCTCCATCTTCACT |
| Ab32 | CAAAAAGCCTGGGAGCAGCGTAAAAGTGTCCT | GTCAGCCTCAGTTGGGGATAGAGTCACCATTA |
| | GTAAGGCCTCCGGCGGCACATTCTCCTCATAC | CATGCAGGGCCTCTCAAAGCATCTCAACCTAC |
| | GCTATATCCTGGGTCCGGCAGGCTCCTGGGCA | CTGAACTGGTATCAGCAAAAACCCGGGAAAGC |
| | GGGCTTGGAATGGATGGGTCGGATTAATCCTA | ACCCAAACTGCTCATCTACGCTGCCTCCTCCC |
| | GCGGCGGGAGCACTTCTTATGCCCAAAAGTTT | TCCAGCGCGGCGTGCCGAGTCGTTTCTCTGGG |
| | CAAGGGCGCGTGACCATGACTCGAGATACCAG | TCAGGGAGCGGTACAGACTTTACGCTGACTAT |
| | TACAAGCACCGTCTACATGGAACTTAGTTCAC | CTCCTCCCTACAGCCAGAGGATTTTGCAACTT |
| | TGAGGTCTGAGGACACCGCAGTGTACTATTGT | ATTACTGCCAGCAGTCTTATACTACACCCTTA |
| | GCTAGAGGCCGATACAGTTCGTCGTCTTGGGG | ACCTTCGGCGGCGGCACAAAGGTTGAAATCAA |
| | TCAGGGTACGCTTGTGACTGTGTCCTCC (SEQ | G (SEQ ID NO: 646) |
| | ID NO: 645) | |
| TMPRSS4 | CAGGTCCAGCTTGTCCAGAGCGGCGCCGAAGT | GACATTCAAATGACCCAGTCACCCAGCTCATT |
| Ab33 | TAAGAAGCCTGGGGCGTCCGTAAAAGTGTCCT | GTCCGCCTCTGTAGGCGATAGAGTGACTATTA |
| | GCAAGGCCTCCGGATATACTTTTTCTAACTAC | CTTGTAGGGCTTCTCAGTACATCTCTCGCTGG |
| | TACATGCATTGGGTGCGACAGGCACCCGGCCA | TTGGCTTGGTATCAGCAAAAGCCAGGGAAAGC |
| | GGGTCTGGAGTGGGTGGGCTGGATGAACCCGA | ACCAAAACTCCTGATCTATGGGAGTTCTACCC |
| | AAAGCGGGAATACTGGTTATGCACAGAAATTT | TACAATCCGGCGTTCCATCTCGTTTCTCCGGG |
| | CAAGGGCGGGTGACAATGACCAGGGACACGAG | AGTGGCAGCGGAACCGATTTCACCCTCACGAT |
| | CACGAGCACAGTTTACATGGAACTCAGTTCAC | AAGCAGCTTACAGCCCGAGGACTTCGCTACAT |
| | TGCGCTCGGAGGATACCGCCGTCTACTATTGT | ATTACTGCCAACAGTACTACAGTACACCTTTC |
| | GCCAGAGGCCGGACCTGGATTCAGTCCTCGCT | ACCTTTGGCCCTGGGACAAAGCTGGAAATCAA |
| | GGGTTATTGGGGTCAGGGAACTCTTGTGACAG | G (SEQ ID NO: 648) |
| | TGTCCAGT (SEQ ID NO: 647) | |
| TMPRSS4 | CAGGTCCAGCTCGTCCAGAGCGGCGCCGAAGT | GACATTCAGATGACTCAGAGTCCCAGCTCACT |
| Ab34 | GAAAAAACCCGGAGCTTCAGTGAAAGTTTCCT | GTCAGCTTCTGTGGGCGACAGAGTGACCATTA |
| | GCAAAGCCTCCGGTTATACCTTCACTGGTTAC | CATGCCGCGCAAGTCAAGGGATCTCCTCCTGG |
| | TACATTCACTGGGTCCGGCAGGCTCCAGGCCA | TTGGCGTGGTATCAACAGAAGCCCGGCAAGGC |
| | AGGGTTGGAGTGGATGGGGTGGATGAATCCAC | ACCTAAGCTGCTGATCTACGCAGCCAGCACCC |
| | ATAGTGGCAACACCGGATACGCCCAGAAATTC | TACAGACTGGGGTGCCTTCTAGGTTTAGCGGT |
| | CAAGGGCGGGTTACAATGACACGTGATACCTC | AGTGGCAGCGGGACTGACTTCACGCTTACGAT |
| | TACTTCTACTGTGTATATGGAACTCAGCTCGC | CAGCTCCTTACAGCCGGAAGATTTTGCCACCT |
| | TGCGCTCTGAGGATACCGCTGTGTACTATTGC | ACTATTGTCAACAGTCCAAATCCATACCTATA |
| | GCCAGGGAGGGCGGTCGATACAGTTCTGGCAG | ACCTTTGGCGGCGGGACAAAGGTTGAGATCAA |
| | ACTGGGGTATTGGGGACAAGGGACACTTGTCA | G (SEQ ID NO: 650) |
| | CAGTATCCAGC (SEQ ID NO: 649) | |
| TMPRSS4 | CAAGTGCAACTGGTGCAGAGCGGCGCTGAGGT | GACATTCAGATGACACAGTCTCCAAGCTCCCT |
| Ab35 | TAAAAAGCCGGGCGCCAGCGTCAAAGTGTCCT | GTCCGCTTCAGTTGGAGATCGCGTTACAATTA |
| | GCAAGGCCTCCGGTTACACGTTCACCGGCTAC | CCTGTCAGGCCTCCCAGGACATCAGTAATTAC |
| | TACATGCATTGGGTCCGGCAGGCACCAGGCCA | CTGAATTGGTACCAGCAGAAACCCGGCAAAGC |
| | GGGCCTGGAATGGATGGGGAAAATCTCAGCCC | TCCCAAACTTCTCATATACAAGGCCTCCAGCC |
| | ACTCTGGGGAAACCAAGTATGCTCAGAACGTG | TCGAGAGCGGCGTGCCTAGTAGATTTTCTGGT |
| | CAAGGCCGAGTCACAATGACTAGGGACACGAG | TCTGGGAGTGGCACAGATTTCACCTTGACCAT |
| | CACTTCGACCGTCTACATGGAGCTGTCTAGCC | TTCAAGTTTGCAGCCTGAGGACTTCGCCACTT |
| | TACGGAGTGAAGATACCGCAGTGTATTACTGC | ATTACTGTCAACAGACTTATACGATACCCATC |
| | GCAAGGGCGAACTACTATGGGGATTATGTAAA | ACATTTGGGCAGGGAACTCGTTTAGAGATCAA |
| | CTACTATTATGGGATGGACGTCTGGGGACAAG | G (SEQ ID NO: 652) |
| | GGACTACCGTGACAGTGTCCTCT (SEQ ID | |
| | NO: 651) | |
| TMPRSS4 | GAAGTGCAGCTGCTCGAAAGCGGCGGCGGGCT | GACATTCAGATGACTCAGAGCCCATCTTCGCT |
| Ab36 | GGTGCAGCCTGGAGGTTCATTACGGTTGTCAT | GTCAGCTAGTGTTGGGGATAGAGTCACCATCA |
| | GCGCAGCGAGCGGCTTCACCTTCTCCTCCCGC | CCTGTAGGGCTTCTCAGTCAATCTCTACATGG |
| | GCTATGAGTTGGGTGCGACAGGCACCTGGGAA | CTCGCCTGGTATCAACAGAAGCCAGGCAAGGC |
| | AGGCCTGGAGTGGGTATCCAGGATTAATTATG | ACCCAAACTGCTGATCTACCGGGCCAGCAACC |
| | ATGGGTCTGCCACAACTTATGCCGACTCTGTT | TCCAGAGCGGCGTGCCGAGTCGTTTTAGCGGC |
| | AAGGGCCGATTTACCATATCCCGCGACAATTC | TCTGGAAGTGGTACTGATTTCACGCTCACCAT |
| | CAAAAACACGCTGTACTTGCAGATGAACTCGC | CTCCAGCCTACAGCCCGAGGACTTTGCCACAT |
| | TTAGAGCTGAGGACACCGCGGTGTACTATTGC | ATTACTGTCAACAAAGCTACAGCACACCCTTA |
| | GCCAGAGGCATAACTATTTTTGGGGTCTTCGA | ACTTTCGGCGGAGGCACAAAGGTCGAAATCAA |
| | TTACTGGGGACAAGGGACACTTGTAACCGTGT | G (SEQ ID NO: 654) |
| | CCTCC (SEQ ID NO: 653) | |
| TMPRSS4 | GAAGTCCAACTGCTCGAATCTGGCGGCGGCTT | GACATTCAGATGACTCAGAGCCCGAGTTCACT |
| Ab37 | GGTTCAGCCTGGCGGGAGCTTGCGGCTCTCAT | GTCAGCTTCGGTCGGAGATCGCGTGACCATAA |
| | GTGCTGCCAGCGGGTTCACCTTCTCCTCCTAT | CTTGCAGGGCTTCTCAGTCAATCAGCCGATAC |
| | GCCATGCATTGGGTTCGCCAGGCACCCGGCAA | CTGAACTGGTATCAACAGAAGCCTGGGAAAGC |
| | GGGCTTAGAGTGGGTGTCTTACATAAGTAGTA | GCCTAAGCTGCTGATCTACTCAGCATCCACTC |
| | GTGGCAGCACCGTGTACTACGCCGATTCTGTT | TCCAAAGCGGCGTGCCCTCCCGTTTTAGCGGC |
| | AAAGGGAGGTTCACCATCTCCCGGGATAATAG | TCTGGGTCTGGGACAGACTTCACACTAACAAT |
| | CAAGAATACGCTGTACCTCCAGATGAACTCCC | AAGTAGTTTACAGCCAGAGGACTTTGCTACCT |
| | TGAGAGCAGAGGACACCGCCGTGTACTATTGC | ATTATTGTCAACAGGCCCACTCTTTCCCGCCA |
| | GCCAGAGTATCTAACGTCACTCCCAGGAGCGG | TCCTTTGGGCAGGGTACAAAACTTGAAATTAA |
| | GTTTGGCTATTGGGGTCAGGGAACGCTTGTAA | G (SEQ ID NO: 656) |
| | CAGTGTCCAGT (SEQ ID NO: 655) | |
| TMPRSS4 | CAAGTGCAGCTGGCTCAGTCTGGGGCAGAAGT | GACATCCAGATGACCCAGTCACCATCTTCCCT |
| Ab38 | CAAAAAACCTGGCGCCTCTGTAAAAGTGTCCT | GTCAGCGAGCGTGGGCGACAGAGTAACTATTA |
| | GCAAGGCCTCCGGCTATACCTTCACCCGGCAC | CCTGTCAGGCTAGTCAAGACATTAGCAGATAC |
| | TACATCCAGTGGGTGCGGCAGGCACCTGGACA | CTCAACTGGTATCAGCAAAAGCCCGGGAAGGC |
| | AGGCTTAGAGTGGATGGGGTGGATTAATCCCA | ACCCAAGCTGCTCATCTACGGTGCCAGCAACC |
| | ACTCCGGCAATACGGGCTATGCCCAAAAATTC | TGCTGAGCGGCGTGCCTAGCAGGTTTTCTGGA |
| | CAAGGGCGCGTTACCATGACTCGAGATACGTC | AGTGGTTCTGGGACAGATTTCACTCTTACAAT |
| | CACATCTACGGTCTACATGGAACTGAGTTCCT | AAGTAGCCTACAGCCGGAGGATTTTGCCACCT |
| | TGCGCTCGGAGGACACAGCGGTGTATTACTGC | ACTATTGTCAACAAACTCATACTACTCCATAT |
| | GCTAGAGGCAGGCAATGGCTCCGTGGGGAATA | ACCTTTGGGCAAGGCACAAGGTTAGAGATCAA |
| | CTTCCAGCACTGGGGACAAGGGACCCTTGTCA | G (SEQ ID NO: 658) |
| | CAGTTTCCAGC (SEQ ID NO: 657) | |
| TMPRSS4 | CAAGTGCAGCTGGTACAGAGCGGCGCAGAGGT | GACATACAGATGACACAGTCGCCCTCATCACT |
| Ab39 | CAAAAAGCCTGGCGCGAGCGTCAAAGTGTCCT | GTCAGCCTCTGTTGGGGATAGAGTGACCATTA |
| | GCAAGGCCTCCGGCGGGAGTTTTAGCGGCTAT | CCTGTAGAGCTTCGCAAGGGATTAGGAACTGG |
| | GCTGTGTCCTGGGTTCGGCAGGCGCCTGGGCA | TTGGCCTGGTACCAGCAGAAGCCCGGCAAAGC |
| | GGGTTTGGAGTGGCTGGGCGTAATTAATCCAT | ACCAAAGCTGCTGATCTACAGAGCAAGCACGC |
| | CCGATTCTTGGACCGCCTTCGCTCAGAAATTT | TACAGAGCGGCGTGCCTAGCCGTTTTAGCGGG |
| | CAGGGCCGCGTTACTATGACTCGAGATACTTC | AGCGGTAGTGGCACAGACTTCACCCTTACCAT |
| | TACTTCTACCGTCTACATGGAACTTAGTAGTC | CTCCTCCTTACAACCCGAAGACTTCGCCACAT |
| | TCAGGTCTGAGGACACGGCAGTGTACTATTGC | ACTATTGTCAACAGAGTTATACAACTCCGTTT |
| | GCTAGGGAACGCGAGGATGATGCCTTCGACAT | ACATTCGGGCAGGGTACAAAGCTCGAGATCAA |
| | CTGGGGACAAGGGACCACGGTCACAGTGTCCT | G (SEQ ID NO: 660) |
| | CC (SEQ ID NO: 659) | |
| TMPRSS4 | CAAGTGCAGCTCGTTCAGTCTGGGGCAGAAGT | GACATTCAGATGACTCAGAGCCCTAGCTCGCT |
| Ab40 | GAAAAAACCTGGGGCGAGTGTCAAAGTGTCCT | GTCGGCTTCTGTAGGCGATAGAGTGACTATTA |
| | GCAAGGCCTCAGGCGGCACATTCTCAAGTTAT | CTTGCCGAGCTTCTCAGAGTATTTCCAGCTAC |
| | GCCATCTCCTGGGTTCGGCAGGCTCCAGGCCA | CTGAATTGGTACCAGCAGAAGCCCGGCAAAGC |
| | GGGCTTGGAATGGATGGGGATAATTAATCCGC | ACCCAAGCTGCTGATCTACGCGGCCTATAACC |
| | GTGGCGGGTCAACCAACTACGCTCAGAAGTTC | TTCAATCTGGGGTGCCATCAAGGTTCAGCGGC |
| | CAAGGGCGGGTAACAATGACCAGAGATACCAG | TCCGGGTCTGGCACAGACTTCACCCTTACAAT |
| | CACTAGCACCGTCTACATGGAGCTCAGCTCCC | CAGTAGCTTACAGCCCGAGGACTTTGCCACCT |
| | TACGCTCAGAAGATACCGCCGTGTACTATTGT | ACTATTGTCAACAGTCCTACTCAATCCCTTTT |
| | GCAAGGGAAGGTTCTAGCTGGTATTATGACGC | ACGTTTGGAGGTGGCACGAAGGTTGAGATCAA |
| | CTTTGATATATGGGGACAAGGAACTATGGTCA | G (SEQ ID NO: 662) |
| | CAGTGTCCTCC (SEQ ID NO: 661) | |
| TMPRSS4 | CAGGTCCAGCTCGTACAGAGTGGCGCAGAGGT | GACATTCAGATGACACAGAGCCCTAGCAGTCT |
| Ab41 | CAAAAAACCGGGCGCCAGCGTTAAAGTGTCCT | GTCAGCCAGCGTTGGCGACAGAGTGACCATCA |
| | GCAAAGCCTCCGGTGGCACATTCTCCTCCTAC | CCTGTAGGGCTTCTCAGTCAATAAGCCGGTGG |
| | GCTATCTCCTGGGTTCGGCAGGCTCCAGGTCA | TTGGCATGGTATCAACAGAAGCCCGGGAAGGC |
| | AGGGCTGGAATGGATGGGGTGGATGAATCCCA | ACCCAAGCTGCTGATCTACGCAGCGAGCACCC |
| | ACTCCGGCGATACACATTATGCCCAAAAGTTT | TCCAGACCGGCGTGCCATCGCGTTTTAGCGGG |
| | CAGGGCCGCGTAACCATGACTAGGGACACCTC | TCTGGCAGCGGCACAGACTTCACCCTTACAAT |
| | TACGTCAACTGTCTACATGGAGCTGTCATCAC | TAGTAGTTTACAGCCTGAGGACTTTGCGACTT |
| | TAAGATCTGAAGATACTGCCGTGTACTATTGT | ACTATTGCTTGCAGCACAGCTCTTATCCTTTC |
| | GCCCGAGAAGGGTCTAGTTGGTACTACGATGC | ACGTTCGGGCAAGGGACAAAGGTGGAGATCAA |
| | TTTTGATATTTGGGGACAAGGCACCCTTGTGA | G (SEQ ID NO: 664) |
| | CTGTGTCGTCC (SEQ ID NO: 663) | |
| TMPRSS4 | CAGGTCCAGCTCGTCCAGTCTGGGGCTGAAGT | GACATTCAGATGACCCAGTCGCCCTCGTCACT |
| Ab42 | GAAAAAACCCGGCGCCAGCGTTAAAGTGTCCT | GTCAGCGAGTGTGGGCGATAGAGTAACCATCA |
| | GCAAGGCCTCAGGCTATTCCTTCACCTCCCAC | CCTGTAGGGCATCTCAGAGCATCCGCAATTAC |
| | TACATGCATTGGGTTCGGCAGGCTCCTGGCCA | CTCAACTGGTACCAGCAGAAGCCAGGGAAAGC |
| | AGGGTTAGAATGGATGGGTTGGATGAACCCGA | ACCCAAGTTGCTGATTTACGAGGCCTCCAGAC |
| | ACTCCGGCAATACCGGTTATGCTCAGAAGTTC | TACAGTCTGGTGTGCCGAGCAGGTTTAGCGGT |
| | CAAGGGCGAGTCACAATGACTCGTGATACTAG | TCCGGGTCTGGCACAGACTTCACGCTCACAAT |
| | CACTTCTACAGTGTATATGGAGCTGAGTAGTC | AAGTAGCTTGCAGCCAGAGGACTTTGCCACCT |
| | TGCGCAGTGAAGATACTGCCGTATATTACTGT | ATTACTGCCAACAAAGCTATAGCGCTCCACCT |
| | GCACGGCTTGGGCAGCAGCTGGATTACTGGGG | ACATTTGGGCCTGGCACGAAGGTTGACATCAA |
| | ACAAGGGACTCTTGTGACCGTGTCCTCC (SEQ | G (SEQ ID NO: 666) |
| | ID NO: 665 | |
| TMPRSS4 | CAAGTGCAGCTCGTCCAGTCTGGGGCTGAAGT | GACATTCAGATGACACAGAGTCCCAGCTCCCT |
| Ab43 | GAAAAAACCGGGTGCCTCCGTCAAGGTGTCCT | GTCAGCCTCGGTTGGGGACCGCGTCACCATCA |
| | GCAAGGCCTCAGGCTACACTTTCATAGGGTAC | CCTGTCAGGCCTCACAAGATATTAGTAATTAC |
| | TACATGCATTGGGTACGGCAGGCACCTGGGCA | CTGAACTGGTATCAGCAAAAACCTGGCAAGGC |
| | AGGTCTAGAATGGATGGGGCGGATTAATCCCA | ACCAAAGCTGCTGATCTACGCGGCAAGCTCCT |
| | ACTCCGGCGAAACTAACTATGCTCAGAAGTTT | TACAGTCTGGGGTGCCCTCGCGTTTTAGCGGA |
| | CAGGGCCGAGTAACCATGACTAGGGACACCAG | AGTGGAAGTGGCACAGATTTCACGCTTACTAT |
| | CACCAGCACGGTCTACATGGAGCTGTCATCTT | CTCAAGCCTCCAGCCTGAGGATTTCGCCACTT |
| | TGAGGAGCGAGGACACCGCTGTGTACTATTGC | ATTATTGTCAACAGTCTTATAGCACACCAGTG |
| | GCTAGAGTTAGAGTGCGCGGCGTGATACACCC | ACATTCGGGCCAGGGACAAAAGTTGACATCAA |
| | TGGCTTTGATCCCTGGGGTCAGGGAACACTTG | G (SEQ ID NO: 668) |
| | TCACCGTGTCCTCC (SEQ ID NO: 667) | |
| TMPRSS4 | CAAGTGCAGTTAGTTCAGTCTGGTGCGGAGGT | GACATTCAGATGACTCAAAGCCCATCATCCCT |
| Ab44 | GAAAAAACCTGGGGCATCTGTGAAAGTGTCGT | GAGTGCCTCTGTGGGCGACCGGGTCACAATAA |
| | GCAAGGCCAGCGGCTATACCTTTCGGAACTAC | CCTGTCAGGCATCACAGGACATCAGCAATTAC |
| | TACATCCACTGGGTCCGCCAGGCTCCTGGTCA | CTGAATTGGTATCAGCAAAAGCCCGGGAAAGC |
| | GGGCCTAGAATGGATGGGCAGGATTAATCCAA | TCCCAAGCTGCTGATATACGCAGCGAGCAGCC |
| | ACTCAGGCGGCACAAACTACGCCCAGAAGTTT | TCCATAGCGGAGTACCTTCTCGATTCAGCGGG |
| | CAGGGACGTGTGACTATGACTAGGGATACCTC | TCCGGGTCCGGGACCGATTTCACTCTTACAAT |
| | CACCTCCACCGTCTACATGGAACTGAGTAGTC | CAGCTCATTGCAGCCCGAAGATTTTGCAACCT |
| | TCAGATCTGAGGATACTGCTGTGTACTATTGC | ATTATTGTCAAGAGTCCTCGTCCTTTCCGTAC |
| | GCCCGCGCCAGAATTGCTGTCGCCGTTTCCGG | ACGTTCGGGCCAGGGACGAAAGTTGACATCAA |
| | GTTCGGCTATTGGGGTCAGGGAACATTGGTAA | G (SEQ ID NO: 670) |
| | CAGTGTCAAGT (SEQ ID NO: 669) | |
| TMPRSS4 | CAGGTCCAGCTCGTCCAGAGTGGCGCGGAAGT | GACATTCAGATGACGCAGAGCCCATCTTCCCT |
| Ab45 | GAAAAAGCCTGGCGCCAGCGTAAAAGTGTCCT | ATCCGCTTCGGTTGGGGATAGAGTGACTATTA |
| | GCAAGGCCTCCGGCTATACCTTTTCACGGTGG | CCTGTCAGGCAACGCAGGACATACGCAATTAC |
| | TATATGCATTGGGTCCGGCAGGCACCAGGCCA | CTGAACTGGTACCAGCAGAAACCCGGCAAGGC |
| | AGGGCTGGAATGGATGGGTCGCATTAATCCCA | TCCGAAGCTGCTTATCTACGCAACATCATCAT |
| | ACTCCGGCGGCACTAACTATGCTCAGAAATTC | TACAAAGCGGAGTGCCATCTCGTTTTTCTGGG |
| | CAAGGGCGAGTAACTATGACTAGGGACACATC | AGTGGGTCAGGCACAGATTTCACCTTGACCAT |
| | TACCAGCACAGTTTACATGGAGCTGTCAAGTT | CAGCTCGCTTCAGCCCGAGGACTTCGCCACCT |
| | TGAGGTCTGAGGATACCGCCGTGTACTATTGC | ACTATTGTCAACAGAGTTACAGCCCTCCGTAC |
| | GCCAGAGTTGGCGGTTATGGGTGGTTTGATCC | ACGTTCGGGCAGGGAACAAAGCTCGAAATCAA |
| | TTGGGGACAAGGGACCCTGGTGACAGTGTCCT | G (SEQ ID NO: 672) |
| | CC (SEQ ID NO: 671) | |
| TMPRSS4 | CAAGTGCAGCTGGTACAGTCAGGCGCCGAAGT | GACATTCAGATGACACAGTCTCCAAGCAGTTT |
| Ab46 | CAAAAAGCCCGGAGCCTCGGTTAAAGTGTCCT | GAGCGCCAGTGTGGGCGACCGTGTAACTATCA |
| | GCAAGGCCTCTGGTTACACTTTTTCCCGGTAT | CGTGTAGAGCAAGTCAGTCAATCAGCACATGG |
| | TTCATGCATTGGGTGCGGCAGGCACCTGGCCA | CTCGCATGGTATCAACAGAAGCCCGGCAAAGC |
| | GGGTTTGGAGTGGATGGGGTGGATTAATCCCA | TCCAAAACTGCTGATCTACGCGGCGAGCAGTT |
| | ACTCCGGTGGCACCAACTACGCCCAAAAGTTT | TACAGTCCGGCGTGCCTTCGAGGTTTTCTGGG |
| | CAGGGAAGAGTGACTATGACCAGGGATACCTC | TCCGGGTCCGGGACCGATTTCACCCTTACAAT |
| | AACTTCCACCGTCTACATGGAACTCAGCTCTC | AAGCAGCCTACAGCCCGAGGATTTTGCTACGT |
| | TGCGCAGCGAGGACACCGCTGTGTACTATTGC | ACTATTGTCAACAGTCTTATGGGTTCCCGTGG |
| | GCTAGAGTCCGAATTGGGTGGCTCCAGTCACC | ACTTTCGGCCAGGGTACAAAGGTCGAAATCAA |
| | TCCACTGTACTGGGGACAAGGGACACTTGTTA | G (SEQ ID NO: 674) |
| | CAGTTTCCTCT (SEQ ID NO: 673) | |
| TMPRSS4 | CAGGTCCAGCTGGTGCAGAGCGGTGCAGAAGT | GACATTCAGATGACTCAGTCTCCAAGCTCGCT |
| Ab47 | CAAGAAGCCCGGTGCAAGCGTAAAAGTGTCCT | GTCAGCTAGTGTTGGCGACAGAGTAACTATCA |
| | GCAAGGCCTCCGGGTACACCTTCACCGGTTAT | CTTGTCGGGCCTCGCAGTCCATCTCCTCATAT |
| | TTCATGCATTGGGTCCGGCAGGCTCCTGGCCA | CTCAACTGGTATCAACAGAAACCGGGCAAGGC |
| | AGGGTTGGAATGGATGGGCTGGATGAATCCCA | ACCTAAGCTGCTCATTTACGCGGCCTCCTCCC |
| | ACTCCGGGAATACCGGCTACGCTCAAAAATTT | TACAGTCTGGGGTGCCTAGTCGTTTTAGCGGG |
| | CAAGGGCGCGTGACCATGACAAGGGATACAAG | TCTGGCTCTGGGACCGACTTCACTCTTACAAT |
| | CACCTCCACCGTGTATATGGAGCTCAGCTCTC | AAGTAGTTTGCAGCCAGAAGATTTCGCCACTT |
| | TGAGATCAGAGGATACAGCCGTTTATTACTGC | ACTATTGTCAACAGAGTTACTCTACGCCCTTA |
| | GTTCGAGGGAGGACTTGGATTCAGTCAAGCCT | ACCTTTGGCGGCGGCACAAAAGTGGAGATCAA |
| | GGGGTACTGGGGTCAGGGAACGCTTGTGACAG | G (SEQ ID NO: 676) |
| | TCTCATCT (SEQ ID NO: 675) | |
| TMPRSS4 | CAAGTGCAGCTGGTCCAGTCTGGGGCGGAAGT | GACATTCAGATGACCCAGTCACCAAGTTCCTT |
| Ab48 | GAAAAAGCCCGGAGCTAGTGTAAAGGTGTCCT | ATCCGCAAGCGTTGGGGATCGTGTTACAATTA |
| | GTAAAGCCAGCGGCTACACCTTCACCGGTTAT | CTTGCAGGGCCTCGCAAGGGATCTCTAATTAT |
| | TACCTGCATTGGGTCCGGCAGGCTCCTGGCCA | CTCGCTTGGTACCAGCAGAAACCTGGGAAAGC |
| | GGGCCTGGAGTGGATGGGCTGGATTTCCGCAT | ACCCAAGCTGCTGATCTACACTGCAAGCACAC |
| | ATAACGGAAACACAAATTACGCCCAGAACCTG | TTTTTCCAGGAGTGCCGTCAAGATTCTCTGGG |
| | CAAGGCCGCGTGACCATGACCAGGGACACAAG | TCCGGGAGTGGCACTGACTTCACCCTTACCAT |
| | CACTAGCACTGTCTACATGGAGTTGTCTAGCT | CTCCTCCCTCCAGCCTGAGGACTTTGCCACAT |
| | TGAGAAGCGAAGATACCGCTGTGTACTATTGC | ATTATTGTCAACAGAGTTACTCCATACCACTC |
| | GCCCGACACTCTTACTCGGGCTCATACTCAAC | ACGTTTGGCGGCGGAACAAAaGTtGAAATCAA |
| | GCTACCCTATTATGGGATGGATGTTTGGGGTC | G (SEQ ID NO: 678) |
| | AAGGGACAACGGTCACAGTATCCTCT (SEQ | |
| | ID NO: 677) | |
| TMPRSS4 | CAGGTCCAGTTGGTACAGAGCGGCGCCGAAGT | GACATTCAGATGACTCAATCTCCCTCGTCACT |
| Ab49 | GAAAAAGCCTGGGGCGTCCGTCAAAGTGTCTT | GTCAGCTAGTGTTGGGGATAGAGTGACTATTA |
| | GCAAGGCCTCCGGCTATACATTCACCGGGTAC | CCTGCCGAGCCAGTCAGTCAATATCTAACTGG |
| | TACATGCATTGGGTGCGGCAGGCACCTGGCCA | CTCGCATGGTACCAGCAGAAGCCAGGGAAGGC |
| | GGGTCTAGAATGGATGGGCCGGATCAATCCCA | TCCCAAACTGCTGATCTACGCCGCGAGCACCC |
| | ACTCCGGCGGCACAAACTATGCTCAGAAATTT | TTCAGAATGGCGTGCCGTCTAGATTTAGCGGT |
| | CAAGGTCGCGTCACCATGACCCGTGACACAAG | TCTGGGTCTGGGACCGACTTTACACTTACTAT |
| | TACGAGCACCGTCTACATGGAGCTGTCCTCCC | CAGTAGTTTACAACCAGAGGACTTTGCTACTT |
| | TCAGGAGCGAGGATACAGCCGTGTACTATTGT | ATTACTGTCAACAGAGCTACACCTTCCCTATT |
| | GCAAGGGAGCGCGCCGGCTATAGCAGCGGGCA | ACGTTCGGCCAGGGAACAAAAGTTGAAATCAA |
| | GTTCGATTATTGGGGACAAGGGACTCTGGTAA | G (SEQ ID NO: 680) |
| | CTGTGTCCTCC (SEQ ID NO: 679) | |
| TMPRSS4 | CAGGTCCAGCTGGTTCAGTCTGGCGCGGAAGT | GACATTCAGATGACCCAGTCGCCGTCCTCCCT |
| Ab50 | TAAAAAGCCAGGCGCCTCCGTCAAAGTGTCCT | ATCCGCCAGTGTCGGTGATCGCGTAACCATTA |
| | GCAAGGCCTCCGGCTATACTTTCACCGGTTAT | CGTGTAGGGCCTCTCAAGGGATCAGCAATTAC |
| | TACATGCATTGGGTGCGGCAGGCACCTGGGCA | CTCGCATGGTACCAGCAGAAACCCGGGAAGGC |
| | AGGGCTGGAATGGATGGGATGGATTAACCCGA | ACCCAAACTGCTGATCTACGCTACAAGCAGAC |
| | ACTCCGGAGGCACACACTATGCCCAAAAGTTT | TCCAGTCAGGCGTGCCCTCTCGCTTCTCTGGC |
| | CAGGGACGGGTTACAATGACTCGTGACACTTC | AGCGGGTCTGGCACCGATTTCACCCTTACAAT |
| | AACTAGCACCGTCTACATGGAGCTTAGTAGTT | AAGTAGCCTCCAGCCTGAGGATTTTGCTACGT |
| | TGAGGTCAGAGGACACCGCTGTGTATTACTGC | ATTATTGTCAACAGAGCTACAAGACTCCCTTA |
| | GCTAGAGTGCGAATCGGGTGGCTGCAGAGTCC | ACCTTTGGCGGCGGGACAAAAGTGGAAATCAA |
| | ACCACTGTACTGGGGACAAGGGACTTTGGTAA | G (SEQ ID NO: 682) |
| | CAGTGTCAAGC (SEQ ID NO: 681) | |
| TMPRSS4 | CAAGTGCAGCTGGTCCAGAGCGGTGCCGAAGT | GACATTCAGATGACGCAGAGTCCAAGCTCCTT |
| Ab51 | GAAAAAGCCTGGGGCGTCCGTGAAAGTGTCCT | GTCCGCTTCTGTGGGCGATAGAGTAACCATTA |
| | GTAAGGCCAGCGGATATACCTTCACCAACTAC | CTTGCAGGGCTTCACAGAGCATCTCTTCATAC |
| | TACATGCATTGGGTCCGGCAGGCTCCCGGCCA | CTGAACTGGTACCAGCAGAAACCCGGGAAGGC |
| | AGGGCTGGAATGGATGGGGTGGATTAATCCAA | ACCCAAACTTCTCATCTACGCTGCCTCCTCCC |
| | AATCTGGCGGCACTTCTTATGCACAGAAGTTC | TACAATCCGGCGTGCCGAGTCGTTTTTCAGGC |
| | CAGGGCCGCGTTACTATGACTAGGGATACAAG | TCGGGCTCTGGCACCGACTTCACACTCACGAT |
| | CACCAGCACTGTCTACATGGAACTGTCGAGTT | AAGTAGTTTACAGCCTGAGGACTTTGCCACCT |
| | TGAGAAGTGAGGATACAGCAGTGTATTACTGC | ACTATTGTCAACAGAGCTATAGCACACCTCTG |
| | GCCAGCGGGAAGCAATGGCTCGTAGGAGGTCG | ACCTTTGGCGGCGGGACAAAGGTTGAGATCAA |
| | ATTCGACTATTGGGGTCAGGGAACACTTGTCA | G (SEQ ID NO: 1000) |
| | CCGTTTCATCC (SEQ ID NO: 683) | |
| TMPRSS4 | CAGGTCCAGCTGGTTCAGTCTGGCGCAGAAGT | GACATTCAGATGACTCAGTCTCCAAGCTCCTT |
| Ab52 | GAAAAAGCCTGGGGCATCTGTAAAGGTGTCCT | GTCAGCGAGTGTTGGGGATAGAGTGACAATAA |
| | GCAAGGCCTCCGGATATACCTTCACTAGATAT | CTTGCAGGGCTAGTCAGGGTATTAGTCGGTGG |
| | TACATCCACTGGGTGCGGCAGGCACCTGGGCA | CTAGGCTGGTACCAGCAGAAACCCGGGAAGGC |
| | AGGGCTGGAATGGATGGGGTGGATGAATCCGA | TCCAAAACTGCTGATCTACGGCGCCAGCAACT |
| | ACTCCGGCAATACCGGGTTTGCCCAAAAACTG | TGCAGACTGGGGTGCCCTCGCGTTTCTCAGGC |
| | CAAGGGCGAGTAACAATGACCAGGGATACCAG | TCAGGCTCTGGGACTGACTTCACCCTTACCAT |
| | CACAAGCACGGTCTACATGGAGCTCAGCTCCC | TAGTAGCTTACAGCCCGAAGATTTTGCCACCT |
| | TCCGCTCTGAGGACACCGCTGTGTACTATTGT | ATTATTGTCAACAGTCATACAGCTCTCCAAGG |
| | GCCCGCGGTCCCTTTCCTAGAGGACGGCTCGA | ACGTTCGGCCAGGGTACAAAGGTTGAGATCAA |
| | CCTGTGGGGACAAGGCACACTTGTCACAGTGT | G (SEQ ID NO: 685) |
| | CCTCC (SEQ ID NO: 684) | |
| TMPRSS4 | CAGGTCCAGCTGGTCCAGTCAGGCGCCGAAGT | GACATACAGATGACACAGTCTCCTAGTTCCTT |
| Ab53 | GAAAAAGCCTGGGGCGTCCGTGAAAGTGTCCT | GTCAGCTTCGGTTGGCGATAGAGTAACCATTA |
| | GCAAAGCCTCCGGCTATACATTTACCCGATAC | CATGCAGGGCCTCTAGATCAATCAACAGGTGG |
| | TACATGCATTGGGTGCGGCAGGCTCCAGGCCA | TTGGCGTGGTATCAACAGAAACCCGGGAAAGC |
| | AGGGCTGGAATGGATGGGGATAATCAATCCCA | ACCAAAACTGCTGATCTACGGAGCATCAACTT |
| | CAGGCGGGTCTACATCGTATGCACAGAAGTTC | TACAGAGTGGCGTGCCTAGCCGTTTTTCTGGC |
| | CAAGGGCGCGTCACTATGACTCGAGACACCTC | AGCGGTAGTGGTACTGACTTCACACTTACGAT |
| | TACTAGCACGGTCTACATGGAACTAAGTAGCC | TAGTAGCCTCCAGCCGGAGGATTTCGCAACAT |
| | TCCGCAGCGAGGATACCGCCGTGTATTACTGC | ACTATTGTCAACAGAGCTACAGCACTCCCACC |
| | GCTAGAGGCAGGACCTGGATTCAATCTAGCCT | |
| | GGGGTATTGGGGTCAGGGAACACTTGTTACCG | TTTGGCGGCGGCACGAAAGTTGAGATCAAG |
| | TGTCCTCC (SEQ ID NO: 686) | (SEQ ID NO: 687) |
| TMPRSS4 | CAAGTACAGTTAGTGCAGAGCGGAGCCGAAGT | GACATTCAGATGACCCAGTCACCTTCTTCACT |
| Ab54 | TAAAAAACCTGGGGCGTCAGTCAAAGTCTCAT | GTCAGCCTCTGTGGGCGACCGGGTTACAATTA |
| | GCAAGGCCTCCGGCTATACCTTCACCTCATAC | CATGCAGAGCTTCGCAGGGAATCTCCAACTAT |
| | TACATGCAGTGGGTTCGGCAAGCTCCCGGGCA | CTGGCTTGGTATCAGCAAAAGCCCGGCAAAGC |
| | GGGCCTGGAGTGGATGGGCTGGATGAACCCTA | ACCCAAGCTCCTTATCTACGCAGCGAGCAGTT |
| | ATTCCGGCAATACTGGTTATGCACAGAAGTTC | TGCAGTCTGGGGTACCCAGTAGGTTTAGCGGG |
| | CAGGGCCGCGTGACTATGACCAGAGATACCTC | TCTGGGAGTGGCACAGATTTTACTCTGACGAT |
| | CACTTCCACCGTCTACATGGAGCTAAGCTCCC | AAGTAGCCTTCAGCCAGAGGATTTCGCCACGT |
| | TCCGTAGCGAAGACACTGCTGTGTACTATTGT | ACTATTGTCAACAGTCCTACTCGATTCCATTC |
| | GCACGAGTGCGCATCGGGTGGCTGCAGAGTCC | ACGTTTGGGCCAGGGACAAAAGTCGACATCAA |
| | TCCGTTGTACTGGGGTCAAGGGACACTCGTGA | G (SEQ ID NO: 689) |
| | CAGTGTCCAGC (SEQ ID NO: 688) | |
| TMPRSS4 | CAAGTGCAGCTCGTTCAGAGCGGCGCGGAGGT | GACATTCAGATGACTCAGAGTCCATCGTCACT |
| Ab55 | CAAGAAGCCTGGCGCCTCAGTCAAAGTCTCTT | GTCAGCCAGCGTTGGGGATAGAGTGACCATCA |
| | GCAAGGCCTCCGGCTATACTTTCACCACGTAT | CTTGCAGGGCTAGTCAAAGTATCTCCTCCTGG |
| | TACATGCATTGGGTGCGGCAGGCTCCCGGCCA | CTCGCATGGTACCAGCAGAAACCTGGGAAGGC |
| | GGGCCTGGAATGGATGGGAATTATTAATCCGA | TCCTAAACTGCTGATATACGCAGCGTCCTCCC |
| | GCGGCGGGAGTACAAGCTACGCTCAGAAATTC | TTCAGTCTGGAGTGCCCTCGAGATTTAGCGGC |
| | CAGGGACGGGTGACTATGACCCGAGACACCAG | TCTGGCTCCGGCACAGATTTCACCCTAACAAT |
| | CACATCTACTGTCTACATGGAGCTGAGTAGCT | ATCCAGCTTGCAGCCCGAAGATTTTGCCACCT |
| | TGCGCTCAGAGGACACCGCCGTGTACTATTGT | ATTACTGTCAACAGTCTTACTCTACACCAAGG |
| | GCACGCGGGAGGAGCTGGTATAGAAGCAACGT | ACGTTTGGTCAAGGGACCCGTTTAGAAATCAA |
| | AGACTATTGGGGACAAGGGACACTTGTAACAG | G (SEQ ID NO: 691) |
| | TGTCAAGT (SEQ ID NO: 690) | |
| TMPRSS4 | CAGGTTCAACTGGTCCAGTCTGGGGCAGAAGT | GACATTGTCATGACTCAAAGTCCATTGAGTCT |
| Ab56 | GAAGAAGCCTGGAGCTTCTGTTAAAGTGTCCT | GCCAGTGACACCTGGGGAGCCCGCGAGCATCT |
| | GCAAGGCCTCCGGTCACACCTTCACTCGATAT | CTTGTAGGAGCAGCCAGTCCCTCCTGCACTCC |
| | TACATGCATTGGGTTCGGCAGGCACCTGGCCA | AACGGCTATAACTATCTCGACTGGTACCTACA |
| | GGGTTTGGAGTGGATGGGGTGGATTAATCCGA | GAAACCCGGGCAGAGCCCTCAGTTACTGATCT |
| | ACTCCGGGAATACTGGGGACGCTCAGAAATTT | ACCTTGGGTCGAATAGGGCCTCTGGGGTGCCA |
| | CAGGGCCGCGTGACCATGACACGGGATACCAG | GATAGATTCTCAGGATCTGGAAGTGGCACTGA |
| | CACCAGCACCGTCTACATGGAACTCAGCTCCC | TTTCACACTGAAGATAAGTAGAGTCGAGGCCG |
| | TGCGCTCCGAAGATACGGCAGTGTACTATTGC | AGGATGTTGGCGTCTACTATTGTATGCAGGCC |
| | GCTAGGGACAGAGGCATAGTGGTGGTGCCCGC | CTTCAGACACCCATTACGTTTGGCCAAGGCAC |
| | TGCCATCGGAGGCATGGACGTATGGGGACAAG | TCGTCTGGAGATCAAG (SEQ ID NO: 693) |
| | GCACCATGGTCACAGTGTCAAGT (SEQ ID | |
| | NO: 692) | |
| TMPRSS4 | CAAGTGCAGCTCGTCCAATCTGGGGCTGAAGT | GACATTGTTATGACTCAAAGTCCCTTGTCCCT |
| Ab57 | GAAAAAGCCTGGAGCCTCCGTGAAGGTGTCCT | GCCCGTGACTCCTGGCGAACCAGCCTCAATCT |
| | GCAAGGCCTCCGGCTACACTTTCACGGGCTAT | CCTGTCGAAGCTCTCAGAGCCTTCTCCACTCT |
| | TTCATGCATTGGGTGCGGCAGGCACCCGGGCA | AATGGCTATAACTATCTGGACTGGTACCTTCA |
| | GGGACTGGAGTGGATGGGCAGGATTAATCCCA | AAAACCGGGCCAGAGTCCTCAGCTCCTAATCT |
| | ACTCCGGCGGGACAAATTACGCGCAGAAGTTT | ACTTGGGATCTAACAGGGCCTCTGGGGTGCCA |
| | CAGGGCCGCGTTACCATGACTAGAGATACCAG | GATAGGTTTAGCGGTAGTGGCAGCGGCACAGA |
| | CACTTCAACCGTTTACATGGAGCTGAGCAGTC | TTTCACCCTGAAAATTTCGCGGGTAGAAGCAG |
| | TGCGCAGCGAGGACACGGCTGTCTACTATTGC | AGGATGTGGGTGTCTACTATTGTATGCAGGGA |
| | GCTAGAGGAAAAGGGCGATATTTCGACCTGTG | ACACATTGGCCAATAACCTTTGGGCAGGGAAC |
| | GGGTAGAGGCACACTCGTAACAGTCTCCAGT | CCGTTTAGAGATCAAG (SEQ ID NO: 695) |
| | (SEQ ID NO: 694) | |
| TMPRSS4 | CAGGTCCAACTGGTCCAGTCTGGGGCAGAAGT | GACATTGTGATGACCCAGTCTCCGCTGTCACT |
| Ab58 | GAAAAAACCCGGCGCCTCCGTAAAAGTGTCCT | CCCAGTGACACCTGGCGAACCCGCTTCAATAA |
| | GCAAGGCCTCCGGCTACACTTTCACCCGATAC | GTTGTAGAAGCAGTCAGTCTTTGCTGCATAGC |
| | TATCTCCACTGGGTCCGGCAGGCTCCCGGTCA | AACGGCTACAACTATCTAGATTGGTACTTGCA |
| | GGGCTTAGAGTGGATGGGGTGGGTTAGTGCAT | GAAGCCTGGGCAGTCGCCACAACTGCTGATCT |
| | ACAATGGAAATACAAACTATGCGCAGAAATTC | ACCTGGGCAGCAATAGGGCATCTGGGGTGCCT |
| | CAAGGGCGCGTGACCATGACCCGAGACACCAG | GACCGCTTTAGCGGCAGCGGTAGTGGCACAGA |
| | CACTTCTACTGTCTATATGGAGCTTTCCTCCC | CTTCACGCTGAAAATTAGCCGTGTAGAGGCCG |
| | TCAGGAGTGAGGATACTGCCGTGTACTATTGC | AAGATGTTGGGGTCTACTATTGTATGCAGGCC |
| | GCTAGAGGTTACTGCTCAGGCGGGTCATGTTA | CTCCAGACTCCATTAACATTTGGACAAGGCAC |
| | TTGGTTTGATCCCTGGGGTCAAGGGACGCTTG | AAAGGTTGAGATCAAG (SEQ ID NO: 697) |
| | TGACCGTGTCCTCC (SEQ ID NO: 696) | |
| TMPRSS4 | CAGGTTCAGCTAGTTCAGAGCGGAGCCGAGGT | GAAATCGTCATGACCCAGTCTCCCGCCACACT |
| Ab59 | CAAGAAGCCCGGAGCGTCTGTGAAAGTGTCCT | GAGTGTATCGCCTGGGGAGCGCGCCACTCTGA |
| | GCAAAGCCTCCGGAGGCACATTCTCCTCCTAT | GTTGTAGAGCAAGCCAGAGCGTGTCGTCCAAT |
| | ACTTTGAGTTGGGTTCGGCAGGCACCTGGCCA | TACCTGGCTTGGTATCAGCAAAAGCCTGGGCA |
| | GGGCCTGGAGTGGATGGGATGGATTCACCCGA | GGCACCCAGGTTGCTTATCTACGGCGCGTCAA |
| | AAAGCGGCGTGACCAAGAATGCACAGAAATTC | CTAGGGCTACCGGGATACCAGCCCGTTTTTCC |
| | CAAGGGCGGGTGACTATGACCCGAGATACTTC | GGGTCTGGTTCAGGGACCGAATTCACGCTCAC |
| | CACGTCTACCGTCTACATGGAACTCAGCTCAC | AATTAGCAGTTTACAGAGCGAAGATTTTGCCG |
| | TGCGCTCAGAGGACACCGCTGTGTACTATTGC | TGTACTATTGTCAACAATACGGGACACTTCCA |
| | GCTAGAGGCTGGGTGTACGGCAGGATGGACGC | TATACCTTTGGCCAAGGCACAAAAGTGGAGAT |
| | CTGGGGTCAGGGTACTACGGTCACAGTCAGTA | CAAG (SEQ ID NO: 699) |
| | GC (SEQ ID NO: 698) | |
| TMPRSS4 | CAGGTCCAGCTCGTGCAGTCCGGAGCAGAAGT | GAAATAGTGATGACCCAGTCACCCGCCACCCT |
| Ab60 | TAAGAAGCCTGGCGCGTCTGTGAAAGTTTCCT | GAGTGTTAGCCCTGGGGAAAGGGCAACCCTGA |
| | GCAAGGCCTCAGGTTACTCCTTCACCACCTAT | GTTGTAGAGCGTCGCAGTCGGTGTCCTCCAAC |
| | TACATCCACTGGGTGCGGCAGGCTCCCGGGCA | ACCCTGGCATGGTATCAGCAAAAACCCGGGCA |
| | GGGCTTGGAGTGGATGGGTATTATTAACCCAT | GGCTCCTAGGCTCCTAATCTACGGCGCCTCTA |
| | CTGGCGGGTCTACAAGCTACGCTCAAAAGTTT | CTCGTGCCACTGGCATTCCCGCCAGATTTAGC |
| | CAGGGTCGGGTCACTATGACACGAGATACTAG | GGGAGCGGGTCCGGCACAGAGTTTACGCTTAC |
| | CACATCTACCGTCTACATGGAGCTGAGCAGTC | AATAAGTTCCTTGCAGTCAGAAGATTTCGCAG |
| | TGCGCAGCGAGGACACCGCTGTGTACTATTGC | TGTACTATTGTCAACAATATGGATCTTCTCCG |
| | GCCCGCGGCGGCTACTATGGCTCCGGATACAA | TTAACGTTCGGGCCAGGCACAAAAGTGGACAT |
| | TTCAGTCGGTTATTGGGGACCAGGGACGCTTG | CAAG (SEQ ID NO: 701) |
| | TAACAGTATCAAGC (SEQ ID NO: 700) | |
| TMPRSS4 | CAGGTTCAGTTGGTCCAGTCTGGCGCGGAAGT | GAGATTGTTATGACTCAGTCTCCGGCCACACT |
| Ab61 | AAAAAAGCCTGGAGCGTCAGTGAAAGTGTCGT | GAGTGTTTCTCCTGGCGAAAGGGCAACTCTCA |
| | GCAAGGCTAGTGGCTATACCTTCACCAATTAC | GTTGCAGAGCATCTCAAAGCGTGTCCTCCTAC |
| | TACATGCATTGGGTGCGGCAGGCACCAGGCCA | CTAGCTTGGTATCAACAGAAACCCGGGCAGGC |
| | GGGCTTGGAGTGGATGGGCTGGATGAATCCCA | ACCTAGGCTGCTCATCTACGGCGCCTCGACCA |
| | ACTCCGGGAACACCGGCTATGCTCAGAACCTG | GAGCCACCGGGATTCCCGCCCGTTTTAGCGGG |
| | CAAGGGCGAGTCACAATGACCCGAGATACCAG | TCTGGGAGCGGGACTGAGTTCACCTTAACAAT |
| | CACTAGCACTGTCTACATGGAGCTGTCCAGCC | AAGTAGCCTTCAGTCAGAAGACTTCGCTGTGT |
| | TGCGCTCAGAGGACACCGCCGTGTACTATTGT | ACTATTGTCAACAGTATGATATATCTGTGACG |
| | GCCCGCGGGAGGACTTGGTTTAGATCCGGAAT | TTTGGGCCAGGCACAAAGGTCGATATCAAG |
| | GGACGTGTGGGGTCAGGGAACGACGGTCACAG | (SEQ ID NO: 703) |
| | TGTCCAGT (SEQ ID NO: 702) | |
| TMPRSS4 | CAGGTCCAGCTGGTTCAGTCTGGCGCGGAAGT | GACATTGTGATGACCCAGTCACCAGATAGCCT |
| Ab62 | GAAAAAGCCGGGCGCCTCCGTCAAAGTGTCCT | TGCAGTGTCCCTGGGAGAAAGGGCTACCATTA |
| | GCAAGGCCTCCGGTTACACCTTCACTGACTAT | ATTGCAAGAGCAGTCAGTCAGTGCTCTACTCA |
| | TACATCCACTGGGTCCGGCAAGCACCCGGGCA | AGCAACAACAAAAACTATTTGGCTTGGTACCA |
| | GGGCCTGGAATGGATGGGGTGGATTTCTACTT | ACAGAAGCCCGGGCAGCCTCCTAAGCTGCTGA |
| | ATAATGGGAACACGAATTATGCACAGAAACTC | TCTACTGGGCCTCTACAAGGGAGTCTGGGGTG |
| | CAGGGCCGCGTCACTATGACCCGGGATACAAG | CCAGATCGCTTTTCCGGGTCCGGCTCCGGGAC |
| | CACTAGCACCGTCTACATGGAGCTAAGTAGCT | AGACTTCACGCTTACAATAAGTAGTCTCCAGG |
| | TGCGTAGCGAGGACACCGCTGTGTATTACTGT | CTGAGGACGTAGCCGTGTACTATTGTCAACAA |
| | GCCAGAGGCATGGTGCGAGGCATGGATGTATG | TACTATACTACACCCTGGACCTTTGGCCAGGG |
| | GGGACAAGGAACAATGGTTACTGTTTCTAGT | AACCAGATTAGAGATCAAG (SEQ ID NO: 705) |
| | (SEQ ID NO: 704) | |
| TMPRSS4 | CAAGTGCAGCTGGTGCAGTCTGGAGCGGAAGT | GACATTGTTATGACACAGTCTCCCGATAGCCT |
| Ab63 | GAAAAAACCTGGCGCCAGTGTGAAAGTGTCCT | CGCCGTTAGTCTCGGCGAGCGTGCCACGATAA |
| | GCAAGGCCTCCGGTTATACTTTCACGGGCTAT | ACTGCAAATCTTCTCAGTCCGTGTTGTACTCA |
| | CGGATGCATTGGGTTCGGCAGGCACCTGGGCA | AGCAACAACAAGAATTATCTGGCATGGTACCA |
| | AGGACTAGAGTGGATGGGCGTAATTAATCCAA | GCAGAAACCTGGGCAACCACCCAAACTGCTGA |
| | ATACTGGGACCGCTCGCTTTGCTCAGAAGTTT | TCTACTGGGCCTCAACCCGCGAATCTGGGGTG |
| | CAGGGACGAGTCACAATGACTAGGGATACATC | CCGGATAGATTCAGCGGGAGCGGCTCCGGGAC |
| | AACCAGCACTGTCTACATGGAGCTGAGCAGCC | AGATTTCACCCTTACTATCTCGAGTTTGCAGG |
| | TCAGGAGCGAAGACACCGCGGTCTACTATTGT | CTGAGGACGTTGCCGTCTACTATTGTCAACAG |
| | GCTTCTGTGGGCGTCTACTGGTATTTTGACCT | TACTATTCAGCACCCTTAACCTTCGGCGGCGG |
| | GTGGGGTAGAGGCACACTTGTAACCGTGTCCT | CACAAAAGTGGAAATCAAG (SEQ ID NO: 707) |
| | CC (SEQ ID NO: 706) | |
| TMPRSS4 | CAGGTTCAGCTGGTACAGTCAGGCGCCGAAGT | GACATTGTAATGACTCAGAGCCCAGATAGTCT |
| Ab64 | GAAAAAACCGGGTGCCAGCGTCAAGGTGTCCT | TGCAGTGTCCTTGGGCGAGAGGGCTACAATCA |
| | GCAAGGCCTCCGGCTACACCTTCACCGGATAT | ACTGCAAGAGCAGTCAGAGCGTGCTCTACTCG |
| | TACATGCATTGGGTCCGGCAGGCACCCGGCCA | TCTAACAACAAAAATTACCTTGCGTGGTATCA |
| | AGGGCTGGAATGGATGGGGATGATTAATCCTA | ACAGAAACCCGGGCAGCCTCCCAAACTGCTGA |
| | GTGGTGGCGGGACCACATACGCTCAGAAGTTC | TCTACTGGGCTTCTACTAGAGAGTCTGGCGTG |
| | CAAGGGCGGGTTACGATGACTCGAGACACCAG | CCTGATCGTTTTAGCGGTTCCGGGTCTGGGAC |
| | CACGTCTACCGTCTACATGGAACTGTCCAGCC | AGACTTCACGTTAACAATAAGTAGCCTCCAGG |
| | TACGCTCTGAGGATACTGCCGTGTACTATTGT | CTGAGGACGTCGCCGTGTACTATTGTCAACAG |
| | GCAAGGGACAGGAGATCAATGATTACCTTTCG | TACTATTCAACACCATATACTTTTGGCCAAGG |
| | CACAGATTATTGGGGTCAGGGAACTCTCGTTA | CACCAAGTTGGAGATCAAG (SEQ ID NO: 709) |
| | CCGTGTCCTCC (SEQ ID NO: 708) | |
| TMPRSS4 | CAGGTCCAACTGGTCCAGTCTGGCGCGGAGGT | GACATTGTGATGACTCAGAGTCCGGATAGCCT |
| Ab65 | TAAAAAGCCTGGGGCTTCAGTCAAAGTGTCGT | TGCAGTGTCTTTGGGCGAGCGCGCCACTATTA |
| | GTAAGGCCTCGGGCTATACATTCACCGGCTAT | ATTGCAAATCCTCCCAGTCCGTTCTCTACAGC |
| | TACATGCATTGGGTCCGTCAGGCACCTGGGCA | TCAAATAACAAGAACTATCTCGCATGGTACCA |
| | AGGGCTGGAATGGATGGGTTGGATGAATCCGA | GCAGAAGCCAGGACAGCCACCAAAACTGCTGA |
| | ACTCCGGGAATACCGGTTATGCCCAAAAATTC | TATACTGGGCTAGTACCAGACAGTCTGGCGTG |
| | CAAGGGAGAGTAACTATGACACGAGACACCAG | CCCGACAGGTTTTCAGGGTCCGGGAGCGGCAC |
| | CACTAGCACCGTGTATATGGAACTCAGCTCTC | AGACTTCACGCTAACGATAAGTAGTTTACAGG |
| | TGAGGAGCGAGGACACAGCCGTGTATTACTGC | CCGAGGATGTCGCTGTGTATTACTGCCAGCAG |
| | GCGGGCCGGAAATGGCTGGGCTTGGATTTCTA | TACTACTCTACACCCTGGACCTTTGGGCAAGG |
| | CAACTGGTTTGATCCTTGGGGTCAGGGAACTC | CACAAAGGTTGAAATCAAG (SEQ ID NO: 711) |
| | TTGTAACGGTGTCCAGT (SEQ ID NO: 710) | |
| TMPRSS4 | CAGGTTCAACTGGTACAGAGCGGCGCGGAAGT | GAGATTGTGATGACTCAGAGCCCTGCTACACT |
| Ab66 | GAAAAAACCCGGCTCGTCAGTTAAAGTGTCCT | GAGTGTATCTCCTGGGGAACGGGCCACCCTCA |
| | GTAAGGCCTCCGGCGGCACATTCTCCTCCTAC | GTTGTAGAGCCTCTCAGAGCGTCAACTCTAGA |
| | GCTATCTCCTGGGTCCGGCAAGCACCCGGGCA | TTTCTAGCCTGGTATCAGCAAAAGCCGGGCCA |
| | AGGTCTGGAGTGGGTGGGTGGCATAATGCCCA | GGCACCAAGGTTGCTCATCTACGGCGCATCAA |
| | TATTCGGGACAGCGAATTACGCTCAGAAGTTT | CTAGGGCAACCGGGATTCCTGCCCGCTTCTCA |
| | CAGGGAAGAGTGACTATTACCGCCGATGAATC | GGCAGCGGGTCAGGGACTGAGTTTACACTTAC |
| | TCCATCTACGGCTTATATGGAACTCTCCAGTC | GATCAGTAGCTTACAGAGCGAGGACTTTGCCG |
| | TGCGCAGCGAGGACACCGCTGTGTACTATTGC | TCTACTATTGCATGCAGGGAACTCACTGGCCA |
| | GCCACCGGGCGTCGAGAGTTGCTGAACTGGGG | TACACCTTCGGCCAAGGGACAAAAGTGGAAAT |
| | TCAGGGAACACTTGTTACCGTGTCCAGC (SEQ | CAAG (SEQ ID NO: 713) |
| | ID NO: 712) | |
| TMPRSS4 | CAGGTCCAGCTAGTTCAGTCTGGGGCAGAAGT | GACATTGTAATGACCCAGTCTCCCGATAGCCT |
| Ab67 | CAAGAAACCGGGTAGCTCAGTGAAGGTGTCCT | TGCCGTGTCCTTGGGCGAAAGGGCAACCATAA |
| | GCAAAGCAAGCGGCTACACTTTCACCTCATAT | ATTGCAAGTCCTCCCAGTCCGTCTTGTACTCG |
| | GATATTAATTGGGTGCGACAGGCACCAGGCCA | AGTAACAACAAAAACTATCTCGCGTGGTATCA |
| | AGGGCTGGAATGGATGGGCGGCATCATTCCCA | GCAAAAGCCCGGGCAACCTCCTAAACTGCTGA |
| | TCTTCGGGACAGCCAATTACGCTCAGAAGTTT | TCTACTGGGCTAGTACCAGAGAGAGCGGCGTG |
| | CAGGGACGGGTTACGATTACTGCCGATGAAAG | CCAGACCGTTTTTCTGGGAGTGGTAGCGGGAC |
| | CACCTCTACTGCCTATATGGAGTTAAGCTCTC | TGATTTCACCCTTACGATAAGTAGTCTCCAGG |
| | TGCGCAGCGAGGACACCGCTGTGTACTATTGT | CCGAGGACGTAGCGGTGTACTATTGTCAACAG |
| | GCCACTACACCAGGCGATGCTTTCGACATATG | TACAGTGACACACCTCTGACCTTTGGGCAAGG |
| | GGGTCAGGGAACAATGGTTACAGTCTCATCT | CACAAAAGTGGAAATCAAG (SEQ ID NO: 715) |
| | (SEQ ID NO: 714) | |
| TMPRSS4 | GAAGTGCAACTGCTCGAATCTGGCGGTGGGCT | GACATCCAGATGACTCAGTCTCCGAGCAGCTT |
| Ab68 | GGTCAAACCTGGTGGATCTCTTCGGCTGTCAT | GAGTGCTTCTGTTGGGGATCGCGTTACCATTA |
| | GCGCAGCCTCCGGGTTTACCTTCTCCTCCTCC | CATGCAGGGCCTCCCAGTCAATCTCTCGTTAC |
| | TGGATGCATTGGGTGCGACAGGCACCCGGGAA | TTAAATTGGTATCAGCAAAAACCCGGCAAGGC |
| | AGGCCTGGAGTGGGTGTCAGCCATCGGGACTG | ACCCAAGCTGCTGATTTACGCGGCGAGCAGTC |
| | CCGGTGATACCTATTACCCTGGCTCGGTGAAA | TCCAAAGCGGAGTGCCATCCAGATTCAGCGGG |
| | GGGAGGTTCACCATTAGCCGGGATGACTCCAA | AGCGGGTCGGGCACCGATTTTACCCTTACAAT |
| | GAATACGCTGTACTTGCAGATGAACTCACTCA | AAGTAGTTTGCAGCCAGAGGACTTCGCTACAT |
| | AGACTGAGGACACGGCTGTCTATTACTGTGCC | ACTATTGTCAACAGTCCTATAGCAACCCACCT |
| | AGAGTGCGACTCGGCCACTTTGACCTGTGGGG | ACTTTTGGCCAGGGAACTAAGCTAGAAATCAA |
| | ACGCGGGACACTTGTAACAGTCAGCTCA (SEQ | G (SEQ ID NO: 717) |
| | ID NO: 716) | |
| TMPRSS4 | GAAGTTCAACTGCTCGAGTCCGGCGGTGGGCT | GACATTCAGATGACCCAGTCTCCAAGTAGCCT |
| Ab69 | TGTTCAGCACGGCGGCTCTTTGCGGCTGTCCT | AAGTGCAAGCGTCGGCGACAGAGTAACAATTA |
| | GTGCTGCGAGCGGATTTGCCTTCTCCTCCTAC | CATGCAGAGCTTCGCAAGGGATCTCAAGTTGG |
| | GTCCTGCATTGGGTTCGGCAGGCACCTGGGAA | CTCGCCTGGTACCAGCAGAAACCTGGGAAAGC |
| | GGGCCTGGAGTGGGTGTCCAGTATCAGTTCCA | ACCTAAGCTTCTCATATACCAGGCCTCAAACA |
| | GTAGCAGCTACATCTACTACGCCGACTCCGTG | AGGATACTGGGGTGCCATCTAGGTTTTCTGGC |
| | AAAGGGCGATTCACCATCTCACGCGACAATTC | TCTGGCTCGGGCACGGACTTCACCCTCACAAT |
| | AAAAAACACACTGTACTTGCAGATGAACAGCC | AAGCAGCTTACAGCCCGAAGATTTTGCCACGT |
| | TTAGGGCCGAGGATACTGCTGTGTACTATTGC | ATTATTGTCAACAGTCATATAGGATTCCGTGG |
| | GCTCGTGGGGATCGCTATCCCGGCCTGCCCAA | ACTTTCGGGCAGGGAACCAAGGTGGAAATCAA |
| | TTATTGGGGTCAGGGAACATTAGTAACCGTGT | G (SEQ ID NO: 719) |
| | CTAGT (SEQ ID NO: 718) | |
| TMPRSS4 | GAGGTCCAGCTTCTGGAATCAGGCGGCGGGCT | GACATTCAGATGACTCAGAGTCCAAGCAGCCT |
| Ab70 | GGTCCAGCCTGGTGGTTCCTTACGGTTGTCCT | GAGCGCCAGCGTTGGCGATAGAGTGACCATTA |
| | GCGCTGCCTCCGGGTTTGCGTTTAGTGGCACT | CCTGCAGAGCGTCACAATCCATCTCGGGTTGG |
| | TGGATGCAGTGGGTGCGGCAGGCACCGGGCAA | CTGGCCTGGTACCAGCAGAAGCCTGGGAAAGC |
| | GGGCCTGGAGTGGGTTTCTGACATTTCCGGGT | ACCCAAGCTCCTCATCTACGCAGCTTCGACCC |
| | CCAGTAGGGACACCAACTACGCTGACAGTGTA | TACGTGATGGGGTCCCATCTCGCTTTAGCGGG |
| | AAGGGACGATTCACAATAAGCAGGGACAACTC | AGTGGCTCTGGCACTGATTTCACGCTCACAAT |
| | TAAAAATACGCTGTACCTCCAGATGAACTCTC | AAGCAGCCTTCAGCCCGAGGACTTCGCCACCT |
| | TGCGCGCTGAAGATACAGCCGTGTACTATTGT | ACTATTGTCAACAGGCCAATTCCTTTCCCTTA |
| | GCAAAAGATCACTGGGATTCATATGGGTATCT | ACCTTCGGACAAGGGACAAAAGTGGAAATCAA |
| | GGACTATTGGGGACAAGGGACTTTGGTGACAG | G (SEQ ID NO: 721) |
| | TGTCTAGT (SEQ ID NO: 720) | |
| TMPRSS4 | GAAGTCCAACTGCTCGAGAGTGGCGGCGGGCT | GACATTCAGATGACCCAATCGCCAAGTTCCCT |
| Ab71 | TGTTCAGCCTGGCGGTTCTTTGCGGCTGTCAT | GAGTGCTTCAGTCGGCGACCGCGTAACTATTA |
| | GCGCCGCGAGCGGCTTCATGTTTGACTATTAC | CCTGTAGAGCCAGTCAAGGGATTTCTAATAAC |
| | GCCATGCATTGGGTTCGACAGGCTCCCGGGAA | CTGAATTGGTATCAACAGAAGCCCGGGAAAGC |
| | GGGCCTAGAGTGGGTGTCCTTGATCTCCTATG | TCCTAAACTGCTGATATACGCGGCATCCTCCC |
| | ATGGGAGGAACAAGTACTACGCCGACTCAGTG | TCCAGTCAGGCGTGCCTAGTCGTTTTAGCGGG |
| | AAGGGCCGCTTCACAATCAGCCGGGATAATTC | TCTGGCTCAGGCACTGACTTTACACTCACGAT |
| | CAAAAACACCCTGTACCTCCAGATGAACAGCC | CAGCTCCTTACAGCCGGAGGATTTCGCCACTT |
| | TTAGAGCCGAAGATACCGCTGTCTACTATTGT | ATTACTGCCAGCAGGCAAATAACTTCCCAATA |
| | GCAAGGCCCGGGAGCTATTCTAGATTTCAGCA | ACGTTCGGGCAGGGAACCAAAGTGGAAATCAA |
| | CTGGGGTCAGGGAACATTAGTGACAGTGTCGT | G (SEQ ID NO: 723) |
| | CT (SEQ ID NO: 722) | |
| TMPRSS4 | GAAGTGCAGCTGCTCGAGTCGGGCGGCGGGCT | GACATACAGATGACTCAGTCTCCAAGCTCCTT |
| Ab72 | GGTGCAACCAGGAGGGTCATTACGGTTGTCAT | GTCAGCTTCTGTTGGGGACCGAGTTACCATCA |
| | GCGCTGCCTCTGGGTTTACGTTCGGAGCCTAC | CTTGTAGGGCCTCACAAAATATCTCCCGCTGG |
| | GTGATGCATTGGGTCCGGCAGGCACCTGGGAA | CTGGCTTGGTATCAGCAAAAGCCGGGCAAAGC |
| | AGGCCTGGAGTGGGTGTCCTCCATTAGTGGCG | TCCCAAGCTGCTGATCTACGCGGCGAGTAGCC |
| | GCAGCACTTACTACGCCGACTCCGTTAAAGGG | TCCAGTCGGGAGTACCCAGCAGATTTAGCGGC |
| | AGATTCACAATAAGCAGGGACAACTCAAAGAA | TCCGGGTCTGGGACCGATTTCACCCTAACAAT |
| | CACGCTGTACCTCCAGATGAATAGCCTTCGCG | CAGTAGCCTCCAGCCCGAGGATTTTGCCACTT |
| | CAGAAGATACCGCCGTGTACTATTGCGCCAGG | ATTATTGTCAACAGGCAATTAGCTTCCCTTTA |
| | CACCCAGTCCGTGGCGTGATTGGGGCAGGCTG | ACCTTTGGCGGTGGCACCAAGGTCGAAATCAA |
| | GTTCGATCCTTGGGGTCAGGGTACACTTGTAA | G (SEQ ID NO: 725) |
| | CAGTGTCCAGT (SEQ ID NO: 724) | |
| TMPRSS4 | GAGGTTCAGCTTCTCGAGTCGGGCGGAGGGCT | GACATTCAGATGACACAGAGTCCATCTTCACT |
| Ab73 | AGTTCAGCCTGGCGGGTCTTTGCGTCTGAGCT | GTCAGCTTCGGTCGGCGACAGAGTGACTATTA |
| | GTGCCGCCAGCGGCTTTACCTTCTCCTCATAC | CATGTCGAGCATCCCAAGGAATCTCCAATTCT |
| | GCCATGCATTGGGTTCGACAGGCTCCTGGGAA | CTGGCGTGGTATCAACAGAAACCCGGCAAAGC |
| | GGGCCTGGAGTGGCTCGCCGTAATCTCCTTCG | TCCCAAGCTGCTGATATACAGCGCAGTGAACC |
| | ACGGGTCTATCAGACACTATGCGGACTCCGTG | TCCAGAGCGGAGTGCCCTCACGCTTTTCCGGA |
| | AAAGGCAGGTTCACCATTTCTCGGGACAATTC | AGTGGCTCTGGGACTGATTTTACACTTACGAT |
| | CAAGAACACGCTGTACTTGCAGATGAACAGTC | AAGTAGCCTCCAGCCTGAAGATTTCGCTACAT |
| | TGCGGGCAGAAGATACCGCCGTGTACTATTGC | ATTACTGCCAACAGGCAAATAGCTTTCCATTA |
| | GCCAAACCAAAGGCCTCCAGCGGGCCGCGCTT | ACTTTCGGCGGCGGAACAAAAGTCGAAATCAA |
| | GATAGATTACTGGGGACAAGGGACTCTTGTGA | G (SEQ ID NO: 727) |
| | CCGTCAGCTCA (SEQ ID NO: 726) | |
| TMPRSS4 | GAAGTGCAGCTGCTCGAAAGTGGAGGCGGGCT | GACATTCAGATGACTCAGTCGCCATCATCGTT |
| Ab74 | GGTTCAACCCGGAGGGAGCTTGCGGCTCTCAT | GTCCGCTAGTGTCGGCGATAGAGTGACTATTA |
| | GCGCTGCGAGCGGTTTTACCTTCTCCTCCTAT | CCTGCCGTGCCTCTCAGAGCGTGTCCTCCTGG |
| | GCCATGCATTGGGTTCGGCAGGCGCCCGGGAA | CTGGCATGGTATCAACAGAAACCTGGGAAGGC |
| | AGGCCTGGAGTGGGTGTCCTCCATCTCAAGTA | ACCGAAGCTGCTCATCTACGATGCCTCTAGTC |
| | GCTCTACCTACATTCACTACGCCGATAGCGTC | TACAGTCTGGCGTACCCTCCCGCTTTAGCGGC |
| | AAGGGTAGATTCACGATCTCCCGCGACAACAG | TCTGGGTCTGGCACCGATTTCACTCTTACAAT |
| | CAAAAATACCCTGTACCTCCAGATGAACTCCT | AAGCAGTTTACAGCCTGAGGACTTCGCCACAT |
| | TACGAGCCGAGGACACTGCTGTGTACTATTGT | ATTACTGTCAACAGGCTAAAAGTTTTCCACCT |
| | GCAAGGGTGGGGAGGTATTACGGCAGCGGCTC | ACGTTTGGCCAAGGGACAAAGGTCGAAATCAA |
| | ATCACTGGTAGACTATTGGGGACAAGGGACAC | G (SEQ ID NO: 729) |
| | TTGTCACCGTGTCTAGC (SEQ ID NO: 728) | |
| TMPRSS4 | GAAGTGCAGTTACTCGAGAGCGGCGGCGGATT | GACATTCAGATGACCCAGTCTCCATCTTCACT |
| Ab75 | GGTCCAGCCTGGCGGTAGCCTGCGGTTGTCAT | GTCAGCTAGTGTTGGGGATAGAGTCACTATAA |
| | GCGCTGCGAGTGGGTTCACCTTCTCCTCATAC | CTTGCAGGGCCTCTCAAGGGATTAGGAACGAC |
| | GCCATGTCGTGGGTCCGGCAGGCACCCGGCAA | CTTAACTGGTATCAGCAAAAGCCCGGGAAAGC |
| | AGGCCTGGAGTGGGTGTCCTCCATCAGTAGTG | ACCGAAGCTCCTGATTTACGCAGCGACAAGAC |
| | CTTCTAGCTACAAGTATTATGCCGACTCCGTG | TGCAAAGCGGCGTACCTAGCAGATTCAGCGGG |
| | AAAGGGCGATTTACCATCTCCCGAGACAATTC | TCGGGTTCCGGGACTGATTTTACCCTCACAAT |
| | CAAGAATACGCTGTACCTCCAGATGAACTCTC | CAGCTCCCTACAGCCAGAGGACTTCGCCACTT |
| | TTCGCGCTGAAGATACCGCCGTGTACTATTGT | ATTACTGTCAACAGGCCCATAGTTTTCCCTAT |
| | GCAAGGGATATATACTCCAGCGGATGGCGCGG | AGCTTTGGGCAGGGAACACGTCTGGAAATCAA |
| | CTACTACTACTATGGGATGGATGTTTGGGGAC | G (SEQ ID NO: 731) |
| | AAGGGACCACGGTGACAGTGTCAAGT (SEQ | |
| | ID NO: 730) | |
| TMPRSS4 | GAAGTCCAACTCCTGGAGAGTGGCGGCGGGCT | GACATTGTGATGACACAAAGCCCAGATTCTCT |
| Ab76 | GGTACAGCCCGGCGGATCTTTGCGGCTGAGTT | TGCTGTCAGCCTCGGAGAGAGAGCCACGATCA |
| | GTGCTGCAAGCGGGTTTACCTTCTCCTCATAT | ATTGCAAATCCTCCCAGTCTGTGCTGTACTCA |
| | GCCATGTCATGGGTTCGGCAGGCACCTGGGAA | TCTAACAACAAGAACTATCTCGCATGGTACCA |
| | GGGCCTAGAGTGGGTCTCAGCCATTAGCGGGT | GCAGAAACCGGGCCAGCCTCCCAAACTGCTGA |
| | CGGGTGGCAATGCGTACTATGCGGACAGCGTG | TCTACTGGGCCTCTACCCGAGCATCGGGCGTG |
| | AAGGGCCGTTTCACCATCAGCCGCGACAATGC | CCTGACCGCTTTAGCGGGTCTGGGTCTGGGAC |
| | CAAAAACAGTCTCTACTTGCAGATGAACTCCC | CGATTTCACTCTTACAATAAGTTCCTTACAAG |
| | TGAGGGCTGAGGACACTGCGGTGTACTATTGC | CAGAAGATGTCGCCGTTTATTACTGCCAGCAG |
| | GCCAAAAATAGTTGGGGCTCTTATAGGCCAAG | TATCTGAGCTTACCCTACACCTTCGGCCAGGG |
| | AGCCTTTGATATTTGGGGACAAGGGACAATGG | TACAAAAGTTGAAATCAAG (SEQ ID NO: 733) |
| | TGACTGTGTCCTCC (SEQ ID NO: 732) | |
| TMPRSS4 | CAGGTTCAGCTTGTCCAGTCTGGTGCCGAGGT | GACATTGTTATGACCCAGTCACCAGATTCGCT |
| Ab77 | GAAAAAGCCTGGCGCGTCAGTTAAAGTGTCCT | GGCAGTGTCCCTGGGCGAAAGGGCTACTATTA |
| | GCAAGGCCAGCGGGAATATCTTCACCGCACAG | ACTGTAAAAGTAGCCAGTCCGTGCTCTATAGC |
| | TACATGCATTGGGTTCGGCAGGCACCAGGCCA | AGTAACAACAAAAACTACTTGGCCTGGTACCA |
| | GGGTTTGGAATGGATGGGCTGGATGAATCCGA | ACAGAAGCCCGGGCAGCCTCCCAAACTGCTGA |
| | ATACCGTCTATACCGGGAGTGCCCAAAAGTTC | TCTACTGGGCCTCTACAAGAGAGTCTGGGGTG |
| | CAGGGCCGAGTCACTATGACAAGAGACACCAG | CCCGACCGTTTTTCTGGCTCTGGGTCCGGCAC |
| | CACATCCACTGTCTACATGGAGCTAAGCTCTC | TGACTTCACGCTTACGATAAGCAGCCTCCAGG |
| | TGCGCTCAGAAGATACCGCTGTGTACTATTGC | CTGAGGACGTAGCTGTGTACTATTGTCAACAG |
| | GCCAGGGATTGGGTCGGTGATGGGTATAATAG | TACTATACCACACCTTTCACGTTTGGCCCAGG |
| | CTTTGATTATTGGGGACAAGGCACATTAGTAA | GACAAAGGTGGACATCAAG (SEQ ID NO: 735) |
| | CTGTGTCCAGT (SEQ ID NO: 734) | |
| TMPRSS4 | GAAGTTCAGCTGCTCGAAAGCGGAGGCGGGCT | GACATCCAGATGACGCAGAGTCCTAGCTCCCT |
| Ab78 | GGTCCAGCCTGGCGGGAGTTTACGGTTGTCCT | GTCAGCCTCTGTCGGCGATAGAGTGACAATTA |
| | GTGCCGCGTCTGGTTTTACCTTCTCCTCATAC | CTTGCCGGGCGAGTCAAGATATCAAGAATTTC |
| | GGCATGAATTGGGTGCGCCAGGCACCCGGGAA | CTCGCATGGTATCAGCAAAAGCCCGGGAAAGC |
| | AGGCCTGGAGTGGGTCAGCGCTATTAGTGGTT | ACCGAAACTGCTGATCTACGCCGCCAGCAGCC |
| | CTGGTGGCAGGACTTACTACGCTGATTCAGTT | TCCAGAGCGGCGTGCCATCTCGTTTTTCAGGC |
| | AAAGGGAGATTCACCATTTCACGAGACAACGC | TCTGGGTCTGGGACAGATTTCACACTTACCAT |
| | TAAAAACAGCCTGTACTTGCAGATGAACTCCC | AAGTAGCTTACAGCCCGAGGACTTTGCCACCT |
| | TTAGGGCCGAGGACACCGCAGTGTATTACTGC | ATTACTGTCAACAGTCTTACAGCACTCCTTGG |
| | GCTAAGGGCACATATTATTCCTCGCCAAAGTA | ACGTTCGGGCAGGGAACAAAGCTAGAAATCAA |
| | TTCGTTTGACTATTGGGGACAAGGCACTCTCG | G (SEQ ID NO: 737) |
| | TAACCGTGTCCTCC (SEQ ID NO: 736) | |
| TMPRSS4 | GAAGTTCAGCTTCTCGAGAGCGGCGGCGGGCT | GACATTCAGATGACACAGAGCCCAAGCTCACT |
| Ab79 | GGTGCAACCGGGAGGTTCTTTGCGGCTGTCAT | GTCAGCTTCTGTAGGCGACCGCGTCACCATCA |
| | GTGCCGCGAGCGGGCTGACCTTCAGCTCATAT | CTTGCAGAGCCTCGCAGGGAATTTCTAATTAC |
| | CAGATGTCATCCGTCAGTCAGGCACCTGGCAA | CTAGCATGGTATCAACAGAAGCCAGGGAAAGC |
| | AGGCCTGGAGTGGGTGTCCTACATAAGCAGTG | TCCTAAGCTGCTGATCTACGCAGCAAGTAGTC |
| | CAGCCAATACTGTGTACTATGCGGACAGCGTT | TCCAGAGTGGAGTGCCGTCCAGGTTTAGCGGC |
| | AAGGGCCGATTCACGATCAGTCGGGACAACTC | AGCGGTTCAGGGACGGACTTCACCCTCACCAT |
| | CAAGAACACTCTGTACCTCCAGATGAACTCCT | AAGTTCCTTACAGCCCGAGGATTTCGCCACCT |
| | TACGCGCAGAGGATACTGCTGTGTACTATTGC | ATTATTGTCAACAGAGCTACTCTACACCCTTG |
| | GCCAGGGAAGATGAGTCTAGATCGCCTTATTG | ACATTTGGGCCAGGGACAAAAGTCGATATTAA |
| | TAGCGGCGGGTCTTGCTACCGTGCTGAATACT | G (SEQ ID NO: 739) |
| | TTCAACATTGGGGTCAGGGTACACTTGTAACC | |
| | GTGTCCTCC (SEQ ID NO: 738) | |

[0563] In some embodiments, the VH of the antibody or antigen-binding fragment that binds to TMPRSS4 is encoded by a nucleic acid comprising a sequence at least 80%, at least 85%, at least 90%, at least 91%, at least 92%, at least 93%, at least 94%, at least 95%, at least 96%, at least 97%, at least 98%, at least 99%, at least 99.5% or 100% identical to the sequence set forth in SEQ ID NO: 583, 585, 587, 589, 591, 592, 593, 595, 597, 599, 601, 603, 605, 607, 609, 611, 613, 615, 617, 619, 621, 623, 625, 627, 629, 631, 633, 635, 637, 639, 641, 643, 645, 647, 649, 651, 653, 655, 657, 659, 661, 663, 665, 667, 669, 671, 673, 675, 677, 679, 681, 683, 684, 686, 688, 690, 692, 694, 696, 698, 700, 702, 704, 706, 708, 710, 712, 714, 716, 718, 720, 722, 724, 726, 728, 730, 732, 734, 736, or 738, optionally comprising a nucleotide sequence encoding the VH CDRs encoded by SEQ ID NO: 583, 585, 587, 589, 591, 592, 593, 595, 597, 599, 601, 603, 605, 607, 609, 611, 613, 615, 617, 619, 621, 623, 625, 627, 629, 631, 633, 635, 637, 639, 641, 643, 645, 647, 649, 651, 653, 655, 657, 659, 661, 663, 665, 667, 669, 671, 673, 675, 677, 679, 681, 683, 684, 686, 688, 690, 692, 694, 696, 698, 700, 702, 704, 706, 708, 710, 712, 714, 716, 718, 720, 722, 724, 726, 728, 730, 732, 734, 736, or 738, respectively. In some embodiments the VL of the antibody or antigen-binding fragment that binds to TMPRSS4 is encoded by a nucleic acid comprising a sequence at least 80%, at least 85%, at least 90%, at least 91%, at least 92%, at least 93%, at least 94%, at least 95%, at least 96%, at least 97%, at least 98%, at least 99%, at least 99.5% or 100% identical to the sequence set forth in SEQ ID NO: 584, 586, 588, 590, 592, 594, 596, 598, 600, 602, 604, 606, 608, 610, 612, 614, 616, 618, 620, 622, 624, 626, 628, 630, 632, 634, 636, 638, 640, 642, 644, 646, 648, 650, 652, 654, 656, 658, 660, 662, 664, 666, 668, 670, 672, 674, 676, 678, 680, 682, 685, 687, 689, 691, 693, 695, 697, 699, 701, 703, 705, 707, 709, 711, 713, 715, 717, 719, 721, 723, 725, 727, 729, 731, 733, 735, 737, or 739, optionally comprising a nucleotide sequence encoding the VL CDRs encoded by SEQ ID NO: 584, 586, 588, 590, 592, 594, 596, 598, 600, 602, 604, 606, 608, 610, 612, 614, 616, 618, 620, 622, 624, 626, 628, 630, 632, 634, 636, 638, 640, 642, 644, 646, 648, 650, 652, 654, 656, 658, 660, 662, 664, 666, 668, 670, 672, 674, 676, 678, 680, 682, 685, 687, 689, 691, 693, 695, 697, 699, 701, 703, 705, 707, 709, 711, 713, 715, 717, 719, 721, 723, 725, 727, 729, 731, 733, 735, 737, or 739. Table 7 provides exemplary nucleic acid sequences encoding scFvs that bind to TMPRSS4. In some embodiments, the antibody or antigen-binding fragment that binds to TMPRSS4 comprises an scFv encoded by a nucleic acid sequence at least 80%, at least 85%, at least 90%, at least 91%, at least 92%, at least 93%, at least 94%, at least 95%, at least 96%, at least 97%, at least 98%, at least 99%, at least 99.5% or 100% identical to a nucleic acid sequence set forth in Table 7, optionally wherein the VH CDRs and the VL CDRs are identical to those in the respective sequences in Table 7.

TABLE 7
TMPRSS4 scFv Nucleotide Sequences

| Clone | scFv Nucleic Acid Sequence |
|---|---|
| TMPRSS4 | CAAGTGCAGCTCGTTCAGTCTGGGGCGGAGGTTAAAAAACCGGGCTCATCTGTGAAAGTGTCTTGC |
| Ab1 scFv | AAGGCCTCCGGCTATACCTTCACCGATTACTACATGCATTGGGTCCGGCAGGCACCCGGGCAGGGA |
| (VH-VL) | CTTGAGTGGATGGGCGGGATTATCCCAATCTTTGGGACTGCAAATTATGCTCAGAAATTCCAAGGG |
| | CGCGTAACTATTACCGCCGACGAAAGCACAAGCACCGCGTACATGGAGCTATCGAGCCTCCGTAGC |
| | GAGGACACCGCTGTGTACTATTGCGCCAAGGAAGGCGCTAATGGCTACTGGGGTCAGGGAACATTG |
| | GTAACAGTGTCCAGTGGAGGCGGCGGTTCAGGAGGTGGTGGAAGTGGAGGAGGAGGTTCCGACATT |
| | CAGATGACTCAGTCGCCAAGTTCACTGTCAGCTTCCGTCGGCGATAGAGTCACTATTACTTGTCAA |
| | GCATCCCAGGATATATCCAACTATTTGAACTGGTACCAGCAGAAGCCCGGCAAGGCACCCAAGCTG |
| | CTGATATACAAGGCCTCCTCTCTGGAATCAGGCGTGCCTAGCCGATTTTCTGGGTCTGGGAGTGGC |
| | ACAGATTTCACGCTGACAATCAGCTCCTTACAGCCTGAGGACTTCGCCACCTATTATTGTCAACAA |
| | AGCAGCAGGATCCCTCCAACCTTTGGGCAGGGAACGAAAGTTGAAATCAAG |
| | (SEQ ID NO: 740) |
| TMPRSS4 | GAAGTGCAGCTCCTAGAGTCTGGCGGCGGGCTGGTTCAACCTGGTGGGTCATTGCGGCTGAGCTGC |
| Ab2 scFv | GCTGCCAGTGGGTTCACCTTTTCAGATTACTACATGTCATGGGTCCGGCAGGCTCCCGGGAAGGGC |
| (VH-VL) | CTTGAGTGGGTGTCCTACATCTCAGGTTCTGGCGATGCAATCTACTATGCTGACTCTGTAAAGGGC |
| | CGCTTCACCATTAGCCGCGACAATTCAAAAAATACTCTGTACCTCCAGATGAACAGCCTTCGAGCC |
| | GAAGATACTGCCGTGTACTATTGTGCAAGGGATAGGTCTGATTGCGGTGGGGACGACAGATTCCTG |
| | TGTGACGGTTATTTTGACCTGTGGGGAAGAGGCACGCTTGTGTCCTTGTCTGGAGGAGGCGGATCA |
| | GGAGGCGGTGGAAGTGGCGGCGGAGGAAGCGACATACAGATGACACAGAGCCCGAGTTCCCTGTCC |
| | GCTAGTGTTGGGGACAGAGTCACCATTACATGCAGGGCCTCGCAGAGCACTAACAACTATGTGAAT |
| | TGGTATCAGCAAAAACCCGGCAAAGCACCAAAACTGCTGATATACGCGGCCTCCTCCCTCCAATCT |
| | GGTGTGCCTTCTCGTTTTAGCGGGAGTGGGTCGGGCACTGATTTCACGCTCACAATCAGTTCCTTG |
| | CAGCCCGAGGACTTTGCCACCTACTATTGTCAACAGAGCTATAGCATTCCTTTAACCTTCGGACCA |
| | GGGACAAAGGTCGATATCAAG (SEQ ID NO: 741) |
| TMPRSS4 | CAGGTTCAGCTCGTCCAGTCTGGGGCAGAAGTGAAAAAACCTGGAAGCAGCGTAAAAGTCTCCTGC |
| Ab3 scFv | AAGGCCTCCGGATATACGTTCACCTCTTATGACATTAACTGGGTGCGGCAGGCACCCGGCCAGGGC |
| (VH-VL) | CTTGAGTGGATGGGCGGGATTATCCCAATTTTTGGGACCACAAAGTTTGCTCAGAAGTTTCAGGGC |
| | CGCGTGACCATAACCGCTGATGAAAGTACAAGCACAGCTTACATGGAGCTCTCGAGTTTGAGGAGC |
| | GAGGATACTGCCGTGTACTATTGTGCCAGAGATTGGTATTCCTCGAGCTGGTATAACGGAGATCGT |
| | GGGGATTGGTTCGACCCATGGGGTCAGGGAACACTTGTAACTGTGTCCTCCGGCGGAGGAGGATCT |
| | GGTGGCGGTGGAAGTGGCGGTGGAGGCTCTGACATAGTTATGACTCAGTCACCACTGTCCCTCCCT |
| | GTGACTCCTGGCGAGCCCGCCTCAATCTCCTGTAGGAGTTCAGGGTCCCTGCTGCATTCTAATGGC |
| | TACAATTACCTGGACTGGTACCTGCAAAAGCCCGGGCAATCACCGCAGCTATTGATCTACGCGGCA |
| | AGTAGCTTACAGAGCGGCGTGCCTGACCGATTCTCTGGGTCAGGGAGCGGTACTGATTTCACCCTG |
| | AAGATCTCTAGAGTTGAAGCCGAGGACGTCGGTGTCTACTATTGCATGCAAGGGACCCACTGGCCC |
| | GGCACGTTTGGCCAAGGGACAAAAGTGGAAATCAAG (SEQ ID NO: 742) |
| TMPRSS4 | CAAGTGCAGCTCGTCCAGAGTGGTGCCGAAGTGAAAAAACCTGGGGCATCCGTAAAGGTGTCCTGC |
| Ab4 scFv | AAGGCCTCAGGCTATTTTTTCACTACATACTACTTACATTGGGTTCGGCAGGCTCCCGGGCAGGGC |
| (VH-VL) | CTGGAATGGATGGGCGTCATAAATCCGAATAGTCGCCTGACTAGCTACGCAGAATCCTTTCAGGGA |
| | AGGGTCACAATGACTAGAGATACCAGCACATCTACCGTCTATATGGAGCTGAGCAGTCTGCGTAGC |
| | GAGGACACCGCTGTGTACTATTGTGAGAGAGAAATGTTCCCATCGAGCTATGGGATTGATGTGTGG |
| | GGTCAGGGAACCACGGTGACAGTTTCAAGCGGAGGAGGAGGGTCTGGTTCCGGAGGAGGTGGATCT |
| | GGCGGCGGTGGATCAGACATTGTTATGACACAATCACCATTGAGCCTCCCAGTGACTCCAGGCGAG |
| | CCCGCCTCCATCTCGTGTCGAAGTTCCCAGTCCCTTCTGCACAGCAACGGCTATAACTACTTAGAC |
| | TGGTACTTGCAGAAGCCCGGCCAGAGTCCTCAGCTCCTAATCTACGCAGCGAGCACGCTCCAGTCA |
| | GGCGTGCCCGATAGGTTTTCTGGCAGCGGGTCTGGGACCGATTTCACGCTGAAGATTTCTCGGGTT |
| | GAAGCTGAGGACGTGGGCGTCTACTATTGCATGCAAGGGACCCACTGGCCTCCTACCTTCGGCCAA |
| | GGGACAAAACTTGAGATCAAG (SEQ ID NO: 743) |
| TMPRSS4 | CAAGTGCAACTGGTTCAGTCTGGGGCGGAAGTCAAGAAGCCAGGCTCTAGCGTAAAAGTCTCGTGC |
| Ab5 scFv | AAAGCCTCCGGGTACACTTTTACGAGCTATTACATGCATTGGGTGCGGCAGGCTCCCGGGCAGGGC |
| (VH-VL) | CTGGAATGGATGGGTCGGATCATTCCTATCCTGGGCGCCACCGATTATGCACAGAAATTCCAAGGG |
| | CGCGTAACTATAACTGCCGACGAGAGCACATCAACCGCCTACATGGAGCTCAGCTCCCTGCGATCC |
| | GAGGACACCGCTGTGTACTATTGCGCCAGGGCTGGCTATTCCTCCATCGCCGCGCGCCCGGCTTTT |
| | TGGGGTCAGGGAACTCTTGTTACCGTGTCTAGTGGAGGAGGCGGGTCCGGTTCAGGTGGAGGCGGA |
| | TCAGGCGGAGGAGGATCTGAGATTGTTATGACACAGTCGCCAGCAACCCTGAGTGTCAGCCCGGGC |
| | GAGAGGGCAACCCTCAGTTGTAGAGCTTCTCAGAGCGTGTCCTCCAACCTAGCATGGTATCAACAG |
| | AAGCCCGGCCAGGCACCCAGGTTGCTCATCTACGGCGCCTCAACAAGAGCCACCGGGATTCCTGCC |
| | CGTTTCTCTGGGAGCGGGAGCGGGACAGAGTTTACGCTTACAATAAGTAGTTTACAGTCAGAAGAT |
| | TTCGCTGTGTACTATTGTCAACAGTACTACTCTCCTTTCCCATTGACTTTTGGTGGCGGCACAAAG |
| | GTGGAAATCAAG (SEQ ID NO: 744) |
| TMPRSS4 | CAAGTGCAGCTCGTCCAGTCTGGAGCCGAAGTGAAAAAACCTGGGGCGTCTGTAAAAGTGTCCTGC |
| Ab6 scFv | AAGGCCTCCGGCTATACTTTCACGAGCTATTACATGCATTGGGTGCGGCAGGCACCAGGACAAGGG |
| (VH-VL) | TTGGAGTGGCTCGGGATAATCAACCCATCAGATTACACCACAAGCTACGCGCAGAAGTTTCAGGGC |
| | CGCGTCACCATGACCAGGGATACTTCTACAAGCACCGTCTACATGGAACTCTCGAGTCTAAGAAGT |
| | GAGGATACTGCTGTGTATTACTGCGCCCGAGTGGCCTCTTCATCCTGGTATCCAGGCGACGAGAAT |
| | TGGTATTTTGACCTGTGGGGCAGAGGCACACTTGTCACCGTTAGCTCAGGCGGTGGCGGGAGTGGA |
| | TCAGGCGGAGGTGGTAGTGGAGGCGGTGGATCGGACATTGTCATGACTCAGTCTCCCGATAGTCTT |
| | GCTGTGTCCCTGGGAGAAAGGGCAACAATTAATTGTAAGTCCTCCCAGTCTGTGCTGTACTCCAGC |
| | AACAACAAAAATTACTTGGCATGGTATCAGCAAAAGCCCGGTCAGCCGCCCAAACTGCTGATCTAC |
| | TGGGCTTCAACCCGGGAAAGCGGCGTGCCTGATCGTTTCAGCGGGAGCGGGTCTGGGACAGACTTT |
| | ACACTGACCATATCCAGCTTACAGGCTGAGGACGTTGCCATCTACTATTGTCAACAATACTATGCC |
| | ATTCCTTGGACTTTCGGGCAGGGAACGAAGGTTGAAATCAAG (SEQ ID NO: 745) |
| TMPRSS4 | CAGGTCCAGCTTGTCCAGTCCGGCGCCGAAGTCAAAAAACCCGGCGCGAGTGTCAAAGTGTCCTGC |
| Ab7 scFv | AAGGCCTCCGGCTATACTTTTTCCCGGTACTTCATGCATTGGGTGCGGCAGGCACCAGGCCAAGGG |
| (VH-VL) | TTGGAGTGGGTTGGCTGGATTAATCCCAACTCCGGGAATACCGGCTATGCCCAAAAGTTTCAGGGC |
| | CGCGTAACCATGACTCGAGATACATCTACATCCACTGTCTACATGGAGCTGTCTAGCCTGCGCAGC |
| | GAAGACACCGCAGTGTACTATTGCGCTAGGGTTGTTACCGGTGGCAGACTGGATGTGTGGGGACAA |
| | GGCACAACCGTGACAGTGTCAAGCGGAGGTGGAGGATCAGGAGGAGGCGGGAGTGGTGGAGGAGGT |
| | TCAGAAATTGTGATGACTCAGAGTCCTGCTACTCTGAGTGTGTCTCCTGGTGAGAGGGCAACCCTC |
| | AGTTGTAGAGCTTCGCAGAGAGTATCTAACAACTATCTCGCATGGTATCAGCAAAAGCCCGGGCAG |
| | GCTCCTAGGCTGCTTATCTACGGCGCGTCAACCCGGGCCTCTGGCATTCCGGCCCGTTTTTCTGGG |
| | AGCGGATCAGGGACTGAGTTCACACTAACAATATCCAGCTTACAGAGCGAGGACTTCGCCGTGTAC |
| | TATTGTCAACAGTACGGGAGCACACCATACACCTTCGGCCAAGGGACGAAGGTTGAAATCAAG |
| | (SEQ ID NO: 746) |
| TMPRSS4 | CAAGTACAGTTGGTCCAGAGCGGCGCAGAAGTCAAGAAGCCTGGGGCGTCAGTGAAAGTGTCCTGC |
| Ab8 scFv | AAAGCCTCCGGGTATCGGTTCACAAGCCAGTACATGCATTGGGTCCGGCAGGCGCCAGGCCAGGGT |
| (VH-VL) | TTGGAGTGGATGGGGATAATTAATCCTAGCGGCGGTAGTACGAGTTACGCGCAGAAGTTCCAGGGC |
| | CGCGTTACCATGACTCGTGACACCTCTACCAGCACCGTCTACATGGAACTCTCCTCCCTGAGGAGC |
| | GAGGATACCGCCGTGTATTACTGTGCTAGAGGCAGGATCGCTGTGGCAGGCCACCCACTCGGCTAC |
| | TGGGGTCAAGGGACTCTTGTAACAGTGTCCAGTGGAGGAGGAGGAAGCGGCGGTGGCGGTAGTGGC |
| | GGTGGAGGGTCAGACATTCAGATGACTCAGTCGCCCTCTTCACTGTCAGCTTCGGTTGGGGATAGA |
| | GTTACTATTACATGCCGAGCCTCTCAGAGTATCTCCTCCTGGCTGGCCTGGTATCAGCAAAAGCCG |
| | GGCAAAGCACCCAAGCTGCTGATCTACGGAGCCAGTTCCCTACAGAGCGGAGTGCCCTCTCGCTTC |
| | AGCGGGAGTGGCTCTGGGACCGACTTCACACTTACAATAAGCAGTTTACAGCCCGAAGATTTTGCA |
| | ACGTATTATTGTCAACAAGCTAACTCATTTCCACCTACCTTTGGCGGAGGAACAAAAGTGGAGATC |
| | AAG (SEQ ID NO: 747) |
| TMPRSS4 | CAGGTCCAACTGGTCCAGTCTGGCGCCGAAGTGAAAAAACCTGGAGCGTCCGTGAAGGTGTCCTGC |
| Ab9 scFv | AAGGCCTCCGGCTACACCTTCACCCGTTATTACATGCATTGGGTTCGCCAGGCACCCGGGCAAGGG |
| (VH-VL) | CTGGAATGGATGGGGTGGATTAATCCGAACTCCGGCGGTACAAATTATGCTCAGAAATTTCAGGGA |
| | AGGGTGACGATGACTCGGGATACTAGCACAAGTACAGTTTACATGGAGCTCTCGAGCCTACGATCA |
| | GAGGACACCGCCGTGTACTATTGTGCTAGAGGCGGCTCATGGGGCAGCGGGCCACTCGGCTATTGG |
| | GGACAAGGGACGCTTGTCACTGTATCCTCCGGAGGCGGTGGATCTGGAGGAGGCGGTAGTGGAGGC |
| | GGAGGGTCAGACATTCAGATGACACAGAGTCCCAGTTCCTTGTCGGCTTCAGTCGGTGATCGGGTG |
| | ACTATAACCTGTCAGGCCTCCCAGGATATTTCTAGGTTCTTGCATTGGTATCAGCAAAAGCCTGGG |
| | AAAGCACCCAAGCTGCTGATCTACGGTGCAAGCAACCTGAAATCTGGGGTGCCATCTAGATTCAGC |
| | GGCAGCGGGAGCGGGACCGACTTTACACTTACCATCTCAAGTTTACAACCAGAGGACTTCGCCACT |
| | TATTACTGCCAGCAGAGCTACTCTACACCTCCCACCTTTGGCGGTGGCACCAAGGTTGAAATCAAG |
| | (SEQ ID NO: 748) |
| TMPRSS4 | CAAGTGCAGCTTGTTCAGTCTGGAGCCGAGGTTAAAAAGCCCGGCGCGTCCGTTAAAGTGTCCTGC |
| Ab10 scFv | AAAGCCTCTGGCTACACCTTCACGAGCTACTACATGCATTGGGTCCGGCAGGCACCGGGCCAAGGG |
| (VH-VL) | TTGGAGTGGATGGGGATTATTAATCCATCTGGTGCCGGGACCACATATGGGCACAACTTTCAGGGA |
| | AGAGTCACAATGACTCGAGACACCTCGACAAGCACCGTCTACATGGAACTCTCTAGCCTGCGCTCA |
| | GAGGACACGGCTGTGTACTATTGTGCTCGCGGCCCTAGGGATACCGCAATGGTGCGGTTCGATTAT |
| | TGGGGTCAGGGAACACTTGTAACAGTGTCCAGTGGAGGCGGAGGGTCAGGTGGCGGAGGTTCAGGC |
| | GGAGGAGGCAGTGAAATTGTGATGACTCAGTCTCCTGCTACTCTGAGTGTATCACCTGGGGAAAGG |
| | GCAACTCTGAGTTGTAGAGCCTCGCAGAGCGTGTCCTCCTATCTGGCGTGGTACCAGCAGAAGCCC |
| | GGGCAGGCACCAAGGCTATTGATCTACGGAGCCAGCACTAGAGCCACCGGGATACCCGCCCGTTTT |
| | TCTGGCAGCGGGTCAGGCACTGAGTTCACCTTAACCATCTCCTCCCTGCAAAGTGAGGACTTCGCT |
| | GTCTATTACTGCCAGCAATATGGTAGCAGCCCAGGCACGTTTGGCCAGGGTACAAAGCTCGAAATC |
| | AAG (SEQ ID NO: 749) |
| TMPRSS4 | CAGGTCCAGCTTGTCCAGTCTGGGGCGGAAGTTAAAAAGCCTGGGGCTAGTGTAAAGGTGTCCTGC |
| Ab11 scFv | AAGGCCTCCGGCGGCACATTTAGCAATTACGCAATCAGTTGGGTGCGGCAGGCTCCAGGTCAAGGG |
| (VH-VL) | TTGGAGTGGGTGGGCCGGATTAATCCCAACTCCGGCGGCACTAATTATGCTCAGAAGTTTCAAGGG |
| | CGCGTTACCATGACCAGGGATACCAGCACTAGCACCGTCTACATGGAACTAAGCTCCCTGAGGTCT |
| | GAGGACACTGCTGTCTACTATTGTGCCAGAGGACGATACTCCTCTTCGTCCTGGGGTCAGGGAACC |
| | CTCGTGACCGTATCATCTGGCGGCGGAGGCTCAGGAGGAGGTGGAAGTGGTGGAGGAGGGTCAGAC |
| | ATTCAGATGACACAGAGTCCCTCATCACTGTCAGCCTCCGTTGGTGATAGAGTGACAATTACGTGC |
| | CGTGCCTCTCAGTCCATCAACAACTACTTAAACTGGTATCAGCAAAAACCGGGCAAAGCACCAAAA |
| | CTGCTGATCTACGCGGCAAGCAGTCTCCAGTCTGGCGTGCCTAGCCGCTTTAGCGGGTCTGGTAGC |
| | GGCACTGATTTCACACTGACAATAAGTAGCCTTCAGCCCGAGGACTTCGCCACCTATTACTGTCAA |
| | CAGTCGTATTCCACAAAATGGACTTTCGGGCAAGGGACGAAAGTGGAAATCAAG |
| | (SEQ ID NO: 750) |
| TMPRSS4 | CAGGTTCAGCTTGTCCAGTCTGGGGCAGAAGTCAAGAAGCCTGGCGCCTCCGTGAAAGTGTCGTGC |
| Ab12 scFv | AAGGCCTCCGGCTATACCTTCTCAAACTACTACATCCACTGGGTTCGACAGGCGCCCGGGCAGGGC |
| (VH-VL) | TTGGAATGGATGGGCTGGATTAATCCGAACTCCGGTGATACAAATTATGCACAAAAATTCCAAGGG |
| | CGGGTAACAATGACCCGGGATACCAGTACATCTACGGTCTACATGGAGCTAAGCAGCCTGCGCAGT |
| | GAAGATACCGCTGTGTACTATTGCGCTAGAGGCATGACCTGGAGGACCTCTGCTGCCACATACTGG |
| | GGTCAGGGAACACTTGTTACTGTGTCCTCCGGCGGAGGAGGATCAGGCGGTGGCGGAAGTGGAGGT |
| | GGAGGTTCAGACATTCAGATGACTCAAAGCCCAAGCTCACTGTCAGCTAGTGTGGGCGATAGAGTG |
| | ACGATTACATGTAGGGCCTCCCAAGGGATCTCGCGCTGGCTCGCGTGGTACCAGCAGAAGCCTGGG |
| | AAGGCACCCAAACTGCTGATCTACGGCGCCAGCAACCTCCAGACTGGGGTGCCCTCTCGTTTTTCT |
| | GGATCTGGTAGCGGCACTGACTTCACCCTGACAATATCCAGCTTACAGCCCGAGGACTTTGCCACC |
| | TATTATTGTCAACAGAGTTATAGCACTCCTCCAACTTTTGGGCCAGGGACGAAAGTCGACATCAAG |
| | (SEQ ID NO: 751) |
| TMPRSS4 | CAGGTTCAGTTGGTTCAGTCTGGGGCAGAAGTTAAAAAGCCAGGCGCGAGCGTGAAAGTGTCTTGT |
| Ab13 scFv | AAGGCCTCCGGCTATACCTTCACCAATTACTACATGCATTGGGTCCGGCAGGCTCCTGGGCAAGGG |
| (VH-VL) | TTGGAGTGGATGGGTTGGATAAGCGCCTACAACGGCAACACCAATTACGCTCAGAAACTGCAAGGG |
| | CGCGTGACGATGACAAGAGACACTTCAACTTCAACCGTCTATATGGAACTGAGTAGCCTCCGATCT |
| | GAGGACACCGCCGTGTACTATTGTGCAACAGCCAGCGGTTGGGGACACAGTAACTCCGCGGGCTAC |
| | TGGGGTCAAGGGACTCTTGTGACAGTCTCTTCAGGTGGCGGCGGATCTGGAGGTGGAGGGTCAGGC |
| | GGAGGCGGTAGTGAGATTGTCATGACACAGTCTCCCGCTACTCTGAGTGTGTCGCCCGGCGAAAGG |
| | GCAACCCTGAGTTGCAGAGCATCCCAGTCGGTGAACGGGAATTATCTCGCCTGGTATCAGCAAAAA |
| | CCGGGCCAGGCTCCCAGGCTGTTAATCTACGGAGTCTCCTCCCGGGCCAGCGGGATTCCTGCTCGT |
| | TTCAGCGGCTCCGGATCAGGCACTGAGTTCACACTAACCATAAGTAGCCTTCAGTCTGAAGATTTT |
| | GCCGTGTACTATTGTCAACAGTATGGAAGCTCTCCATACACGTTTGGGCAGGGAACAAAGGTTGAG |
| | ATCAAG (SEQ ID NO: 752) |
| TMPRSS4 | GAAGTCCAACTGCTCGAGAGCGGCGGTGGGCTGGTTCAGCCAGGCGGTAGTCTCCGGCTGTCCTGT |
| Ab14 scFv | GCTGCGAGTGGGTTCACCTTTTCCAATCACTATATGAGCTGGGTGCGGCAGGCTCCGGGAAAAGGC |
| (VH-VL) | CTGGAGTGGGTATCAGCCATCTCCGGGTCTGGCGGCAGCACTTATTACGCCGATAGCGTTAAGGGT |
| | CGCTTCACCATTAGCCGGGACAACTCCAAGAACACACTGTACTTGCAGATGAACTCATTACGCGCT |
| | GGGGATACCGCCGTGTACTATTGCGCGAGGGACCGATACAGATGGGGCAGAGGCTATTTTCAGCAT |
| | TGGGGACAAGGGACTCTAGTAACAGTGTCCTCGGGCGGAGGAGGGAGTGGAGGTGGTGGATCTGGA |
| | GGCGGTGGCTCTGACATCCAAATGACACAGTCACCTTCATCCTTGTCCGCCTCTGTCGGCGATAGA |
| | GTGACGATTACATGTAGGGCAAGTCAGAGGATTAGCACTTATCTGAATTGGTACCAGCAGAAGCCC |
| | GGAAAAGCACCCAAACTGCTGATCTACTCCGCATCGACCCTCCAGGCTGGGGTGCCATCTCGTTTT |
| | AGCGGGTCTGGCTCAGGCACCGATTTCACGCTTACAATAAGTAGCCTCCAGCCCGAGGACTTTGCC |
| | ACTTATTACTGCCAACAGGCCTACTCTCTTCCTTGGACCTTCGGGCAGGGAACTAAGTTAGAAATC |
| | AAG (SEQ ID NO: 753) |
| TMPRSS4 | CAGGTTCAGCTGGTCCAGTCGGGCGCCGAAGTGAAGAAGCCTGGGGCGAGTGTTAAAGTGTCCTGC |
| Ab15 scFv | AAGGCCTCTGGCTACACTTTCACTCGTTATTACATGCATTGGGTTCGGCAGGCACCTGGGCAAGGG |
| (VH-VL) | CTGGAATGGATGGGGTGGATTAACCCGAACTCCGGAGTGACCAATTTTGCTCAGAAGTTCCAAGGG |
| | CGCGTAACTATGACACGGGACACCAGTACATCAACCGTCTACATGGAGCTGTCCAGCCTAAGGAGC |
| | GAAGACACTGCTGTGTACTATTGTGCGAGGGTCAGAATTGGCTGGCTCCAGTCACCTCCACTGTAC |
| | TGGGGACAAGGAACGCTTGTGACAGTATCCAGCGGCGGCGGAGGATCTGGTGGTGGTGGATCTGGC |
| | GGCGGTGGATCAGACATACAGATGACCCAGTCGCCAAGCTCCTTGAGTGCTTCCGTCGGAGATAGA |
| | GTGACTATAACCTGCCGAGCCTCTCAGTCAATCAATACCTGGCTCGCCTGGTATCAGCAAAAGCCC |
| | GGCAAAGCTCCCAAACTGCTGATCTACGCAGCAAGCAGTCTCCAGAGCGGCGTGCCCTCACGCTTT |
| | TCTGGGTCTGGGAGTGGTACAGATTTCACCCTTACAATTAGCAGCTTGCAGCCAGAGGATTTTGCC |
| | ACGTATTATTGTCAACAGGCCATCTCCTTTCCCTTAACCTTCGGCGGCGGGACAAAAGTGGAGATC |
| | AAG (SEQ ID NO: 754) |
| TMPRSS4 | CAGGTCCAGCTCGTACAGTCCGGCGCGGAGGTTAAAAAGCCTGGTGCAAGTGTAAAAGTTTCCTGC |
| Ab16 scFv | AAGGCCTCCGGTTACACTTTCTCACGGCACTACATGCATTGGGTCCGGCAGGCACCCGGGCAGGGC |
| (VH-VL) | TTGGAATGGATGGGGCGCATTAATCCGAACTCCGGCGGTACTAATTACGCTCAGAAATTTCAAGGG |
| | CGAGTTACCATGACAAGGGATACCTCTACTTCCACCGTGTATATGGAACTGAGTAGCCTTAGGAGC |
| | GAGGACACCGCTGTGTACTATTGTGCCAGAAGCATCTACGGCGATTATTGGTTTGATCCTTGGGGA |
| | CAAGGGACACTTGTCACAGTGTCTAGTGGAGGCGGAGGGTCTGGAGGTGGAGGCAGCGGCGGAGGT |
| | GGATCTGACATTCAGATGACCCAGTCTCCATCATCACTGTCAGCTTCTGTGGGCGATAGAGTGACA |
| | ATAACATGCAGGGCCTCCCAGTCGATCAATCGCTGGCTCGCGTGGTATCAACAGAAGCCCGGGAAA |
| | GCACCAAAGCTGCTGATTTACGGCGCCAGCAACCTACAGAGCGGCGTGCCTAGTCGTTTTAGCGGT |
| | TCAGGGTCTGGAACCGACTTCACGTTGACAATAAGCAGTTTACAGCCCGAGGACTTTGCCACCTAT |
| | TATTGTCAACAGGCTAACTCCTTCCCATACACTTTCGGGCAAGGCACTAAGCTGGAAATCAAG |
| | (SEQ ID NO: 755) |
| TMPRSS4 | CAAGTGCAGCTTGTTCAGTCCGGCGCTGAAGTGAAAAAACCCGGCGCATCAGTTAAAGTGTCCTGC |
| Ab17 scFv | AAGGCCTCCGGCTATACTTTCACATCGTATTACATCCACTGGGTCCGGCAGGCTCCTGGGCAGGGA |
| (VH-VL) | CTAGAGTGGATGGGGTGGATGAGCCCTAATAGCGGCGATACCGGTTACGCCCAAAAGTTTCAGGGC |
| | CGCGTAACCATGACCAGGGACACATCTACATCCACCGTCTACATGGAGCTTAGCTCTTTGCGATCC |
| | GAAGATACGGCTGTGTACTATTGCGCCCGGCTCGTCCGTGGCGGGTTTGATTACTGGGGTCAGGGA |
| | ACGCTGGTAACAGTGTCAAGTGGTGGCGGAGGATCAGGCGGAGGCGGATCTGGTGGTGGCGGCTCT |
| | GACATTCAGATGACCCAGTCTCCAAGCAGCCTGAGTGCCTCGGTTGGGGACAGAGTGACTATTACC |
| | TGTCGCGCTAGTCAGGGAATCTCCTCCTACCTGAACTGGTATCAACAGAAGCCCGGGAAGGCACCC |
| | AAACTCTTGATTTACGCGGCGAGTAGACTCCAAAGCGGAGTGCCGAGCAGGTTTTCCGGGAGCGGG |
| | TCTGGCACCGATTTCACACTGACAATAAGTAGTTTACAGCCAGAGGACTTCGCAACTTACTATTGT |
| | CAACAGTCTTATAGAAGCCCTCCAACTTTCGGGCAGGGAACTAAGCTGGAAATCAAG |
| | (SEQ ID NO: 756) |
| TMPRSS4 | CAGGTCCAGCTCGTACAGAGTGGCGCCGAAGTCAAGAAGCCTGGAGCTTCCGTCAAAGTGTCCTGC |
| Ab18 scFv | AAAGCCAGCGGCTATACTTTCACGTCCTCAGGAATTAATTGGGTTCGGCAGGCACCCGGGCAGGGC |
| (VH-VL) | TTGGAGTGGATGGGGTGGATTAATCCCAACTCCGGCGGCGCAAAATATGCCCAACGCTTCCAGGGA |
| | CGGGTTACTATGACCCGAGATACCAGCACCTCTACTGTCTACATGGAGCTGAGCAGCCTTAGGAGT |
| | GAAGATACCGCTGTGTACTATTGCGCCAGGGCGAGAGGGTATTCTGGCTCGAAAAGAGATTTTCAG |
| | CATTGGGGACAAGGGACATTGGTTACAGTCTCATCAGGAGGAGGCGGTTCTGGCGGCGGCGGGAGT |
| | GGAGGTGGTGGATCTGACATTGTGATGACACAGAGTCCGGACAGCCTTGCTGTGTCTCTCGGTGAA |
| | CGCGCGACCATCAACTGCAAGTCCTCCCAGTCGGTGCTGTACTCAAGCAACAACAAGAATTACCTG |
| | GCCTGGTATCAACAGAAACCGGGCCAGCCTCCAAAGCTGCTGATCTACTGGGCTAGTACCAGGGAG |
| | TCTGGGGTGCCTGATCGTTTCTCCGGTAGCGGCTCCGGGACAGACTTCACCCTAACTATAAGCAGT |
| | TTACAAGCAGAGGACGTGGCCGTATATCACTGTCAACAGTACTACAATACACCATTTACGTTTGGA |
| | CCAGGGACAAAAGTGGACATCAAG (SEQ ID NO: 757) |
| TMPRSS4 | CAAGTGCAGTTGGTTCAGTCTGGAGCCGAAGTGAAGAAGCCTGGGGCGAGCGTCAAAGTGTCCTGC |
| Ab19 scFv | AAGGCCTCCGGCTACACTTTTAACCGGAAATTCATGCATTGGGTTCGGCAGGCACCCGGTCAAGGG |
| (VH-VL) | CTGGAATGGATGGGCTGGATGAACCCGAACAACGGTGCAACTAATTATGCACAGAAGTTCCAGGGC |
| | CGCGTGACAATGACACGAGATACCAGCACTTCAACCGTCTACATGGAGCTCTCTTCCCTAAGGAGC |
| | GAAGATACCGCCGTCTACTATTGTGCTAGAGGAAGAGGCTATTATGGTTCTGGTTCATACTATGGG |
| | GACTATTGGGGACAAGGGACCCTTGTAACAGTCTCCTCTGGAGGAGGCGGATCAGGCGGTGGCGGA |
| | AGCGGTGGAGGAGGCTCAGATATTCAGATGACCCAGTCGCCAAGTTCCTTGTCCGCTTCCGTAGGC |
| | GACCGCGTGACTATAACTTGCAGGGCCTCTCAAAGTATCTCGAGATACCTGAATTGGTACCAGCAG |
| | AAGCCAGGGAAAGCTCCAAAACTGCTGATCTACGGAGCGAGCAATCTCCAGAGCGGCGTGCCGAGT |
| | CGTTTTAGCGGCAGCGGGTCTGGGACAGACTTCACGCTGACAATAAGTAGCTTACAGCCCGAGGAT |
| | TTTGCTACGTATTACTGTCAACAGAGTTACTCCACACCTCCCACCTTCGGCCCTGGGACGAAAGTG |
| | GACATCAAG (SEQ ID NO: 758) |
| TMPRSS4 | CAAGTGCAGCTGGTGCAGAGTGGCGCGGAGGTCAAAAAGCCTGGGGCGTCCGTGAAAGTGTCCTGC |
| Ab20 scFv | AAGGCCTCCGGATACACCTTCACCCGATATTACATGCATTGGGTTCGGCAGGCACCAGGCCAAGGG |
| (VH-VL) | CTCGAATGGATGGGGTGGATGAATCCCAACTCCGGGAATGCAGGCTATGCTCAGAAACTGCAAGGC |
| | CGCGTGACTATGACTCGCGACACCTCCACCTCAACTGTCTACATGGAGCTAAGTAGCTTGAGGTCT |
| | GAGGACACCGCTGTGTATTACTGTGCCAGAGGCTACAACTGGTTTGATCCATGGGGTCAGGGAACA |
| | CTTGTAACAGTGTCAAGTGGAGGAGGTGGAAGTGGCGGCGGAGGCTCAGGTGGTGGCGGAAGCGAC |
| | ATTCAGATGACCCAGTCGCCCTCTTCACTGTCCGCCTCAGTTGGGGACAGAGTAACCATTACCTGT |
| | AGGGCCTCTCAGAATATCGCCACATACCTGAGCTGGTATCAGCAAAAGCCTGGCAAAGCTCCAAAG |
| | CTGCTGATCTACGGTGCAAGCGCCCTCCGGTCTGGAGTCCCTAGCCGTTTTTCTGGGTCCGGGAGC |
| | GGGACAGATTTCACTCTCACAATATCTAGCTTACAGCCGGAAGATTTCGCTACTTATTACTGCCTT |
| | CAGCACAACACATATCCCTTGACATTTGGCGGAGGCACGAAGGTTGAAATCAAG |
| | (SEQ ID NO: 759) |
| TMPRSS4 | CAGGTTCAACTGGTCCAGTCAGGCGCTGAAGTGAAGAAGCCTGGCGCCTCTGTGAAAGTGTCCTGC |
| Ab21 scFv | AAAGCCTCCGGTTATAGTTTCTCTGGCTACTATCTGCATTGGGTTAGGCAGGCACCTGGGCAGGGC |
| (VH-VL) | CTGGAATGGATGGGGTGGATGAATCCCGATTCTGGGAATACTGGCTACGCGCAAAACTTTCAGGGA |
| | CGGGTTACAATGACCCGAGATACTTCCACCTCAACCGTCTACATGGAACTCTCCTCTCTGCGGAGC |
| | GAGGACACCGCCGTGTACTATTGTGCTCGCCTGCACCGTGGCGGGCACGATTACTGGGGTCAGGGA |
| | ACACTTGTCACTGTATCGAGTGGTGGCGGAGGGTCCGGAGGTGGAGGCTCGGGTGGAGGTGGATCA |
| | GACATTCAGATGACTCAGAGTCCAAGCAGTTTGAGTGCTTCTGTGGGCGACAGAGTAACTATTACA |
| | TGCAGGGCCTCCCAGTCAATCTCTCGCTATCTCAACTGGTATCAGCAAAAACCCGGCAAGGCACCG |
| | AAGTTACTGATCTACGCAGCGAGCACGCTACAGAGCGGAGTGCCATCAAGATTTAGCGGCAGCGGG |
| | TCCGGGACCGATTTCACCCTTACGATAAGCAGCTTGCAACCTGAGGACTTCGCCACCTACTATTGT |
| | CAACAGTCTTACTCCACACCCGTGACATTTGGGCAGGGAACACGGCTCGAGATCAAG |
| | (SEQ ID NO: 760) |
| TMPRSS4 | CAGGTTCAGCTGGTCCAGTCTGGCGCCGAAGTTAAAAAACCTGGCGCGAGCGTGAAAGTGTCCTGC |
| Ab22 scFv | AAGGCCTCCGGTTACACATTCACTTCATATTACATGCATTGGGTGCGGCAGGCTCCTGGGCAAGGG |
| (VH-VL) | TTGGAGTGGATGGGGCGGATTAATCCGCACTCTGGCGACGCCGATTTCGTCGATAAGTTTCAAGGG |
| | CGCGTGACTATGACCAGGGATACTAGCACCAGCACCGTCTACATGGAGCTATCAAGTTTGCGCTCC |
| | GAAGATACCGCAGTGTACTATTGCGCCAGGGACAGAAGAGGATATGGCGGCAATAGCCTTGACTAT |
| | TGGGGACAAGGGACACTTGTAACTGTTAGTTCTGGCGGTGGAGGAAGCGGAGGAGGCGGTTCCGGA |
| | GGAGGCGGTTCAGACATTCAGATGACTCAGAGTCCAAGTTCACTGTCAGCTTCCGTGGGTGACAGA |
| | GTGACGATAACATGTAGGGCCGGGCAGAACATCAAGCGATACCTCAACTGGTACCAGCAGAAACCT |
| | GGGAAGGCACCCAAACTGCTGATATATGCAGCGAGCAGCCTCCAGTCTGGGGTACCCTCTCGTTTC |
| | AGCGGCTCTGGGTCCGGCACCGATTTTACGCTCACAATCAGTTCCCTGCAACCAGAGGACTTTGCT |
| | ACATACTATTGTCAACAGTCGTACAGCTCGCCCTTAACCTTCGGAGGCGGCACCAAAGTCGAAATC |
| | AAG (SEQ ID NO: 761) |
| TMPRSS4 | CAGGTTCAGTTGGTACAATCAGGAGCAGAAGTGAAAAAGCCTGGAGCCTCAGTGAAGGTGTCCTGC |
| Ab23 scFv | AAAGCCTCCGGCTATACATTCACCCGGAATTACCTCCATTGGGTTCGGCAGGCTCCTGGCCAGGGC |
| (VH-VL) | CTGGAGTGGATGGGGATTATTAATCCCAGTGGCGGCAGCACCACTTACGCCCAGAAGTTCCAAGGC |
| | CGCGTAACAATGACCCGAGATACATCAACTTCCACCGTCTACATGGAACTCTCCAGCCTGAGGAGC |
| | GAGGACACGGCTGTGTACTATTGTGCCCGCGGCAGGACATGGTTCAGATCAGGCATGGATGTGTGG |
| | GGTCAAGGGACCACCGTTACAGTGTCCTCCGGAGGAGGAGGGAGCGGTGGCGGAGGAAGTGGTGGT |
| | GGAGGATCAGAAATCGTGATGACTCAGAGTCCCGCCACACTGAGTGTCAGCCCGGGCGAGCGGGCA |
| | ACACTGAGTTGCAGAGCCTCCCAGTCTGTCGGCAACTATCTAGCTTGGTATCAGCAAAAGCCTGGG |
| | CAGGCTCCAAGGCTGCTTATTTACGGCGCGAGCACTAGAGCAACTGGGATACCAGCGCGTTTTTCT |
| | GGGTCTGGGTCTGGGACTGAGTTTACCCTTACCATCAGCTCGTTACAGTCTGAGGACTTCGCAGTG |
| | TACTATTGTCAACAGTACCACTCTAGCCCACCATATACGTTTGGGCAGGGTACGAAAGTCGAAATC |
| | AAG (SEQ ID NO: 762) |
| TMPRSS4 | CAAGTGCAGCTGGTCCAGTCAGGCGCGGAAGTCAAAAAATCTGGCGCGAGCGTTAAGGTGTCCTGC |
| Ab24 scFv | AAGGCCTCCGGTTACACCTTTACGTCCTATTACATGCATTGGGTCCGGCAGGCACCTGGGCAGGGC |
| (VH-VL) | CTGGAGTGGATGGGCGTTATAAATCCCTCTGGCGGCACTACAAGCTACGCCCAGAAGTTTCAAGGG |
| | CGGGTGACAATGACTCGAGAGACAAGCACTAGCACCGTCTACATGGAACTCAGCTCGCTGCGCTCA |
| | GAAGATACCGCCGTGTATTACTGCGCAAGAGGAAGAGGGTGGCTGAGGTCTGCTCTCGGCTATTGG |
| | GGTCAGGGTACACTTGTAACCGTGTCCTCCGGAGGCGGAGGTAGTGGCGGAGGAGGATCTGGCGGA |
| | GGAGGGTCTGACATTCAGATGACCCAGTCTCCCTCGTCCTTGTCAGCCAGCGTGGGTGATCGCGTT |
| | ACCATTACCTGTAGGGCTAGTCAGAGTATCTCCTCCTGGCTCGCTTGGTATCAGCAAAAGCCCGGC |
| | AAAGCTCCTAAGCTGCTGATCTACGCAGCCTCAACTTTGCAGTCCGGCGTACCGAGTCGTTTTTCT |
| | GGGAGCGGGAGCGGGACCGACTTCACGCTAACTATTAGTAGCTTACAGCCAGAGGACTTCGCCACT |
| | TATTATTGTCAACAGTCATACAACACGCCATACACATTCGGGCAAGGCACAAAACTTGAGATCAAG |
| | (SEQ ID NO: 763) |
| TMPRSS4 | CAGGTCCAGTTAGTGCAGTCTGGGGCGGAGGTGAAAAAGCCAGGAGCGAGCGTGAAAGTGTCCTGC |
| Ab25 scFv | AAAGCCTCCGGCGGGCGATTTTCAACATACGCCCTGTCATGGGTTCGGCAAGCACCCGGCCAGGGC |
| (VH-VL) | CTGGAGTGGATGGGGTGGATTAACCCGAACTCCGGCGGCACAAATTACGCCCAGAAATTCCAGGGC |
| | CGCGTAACTATGACTCGAGACACCTCAACTTCCACCGTCTACATGGAGCTAAGCTCTCTGAGGAGT |
| | GAAGACACAGCAGTGTACTATTGCGCCAAGTCCTTGTGGTGGAGTCCAAGCCACTACTATTACTAT |
| | GGGATGGATGTGTGGGGTCAAGGCACCACAGTCACAGTTTCCAGCGGAGGAGGTGGAAGTGGAGGC |
| | GGCGGCTCTGGAGGAGGAGGCAGTGAAATCGTGATGACACAGAGCCCTGCTACCCTGAGTGTTAGC |
| | CCTGGGGAAAGGGCTACCCTCTCGTGTAGAGCCTCACAATCTGTCTCCTCCAATTATCTCGCCTGG |
| | TATCAACAGAAGCCCGGGCAGGCTCCCAGGTTGCTTATCTACGGGATTTCAACTAGAGCATCGGGT |
| | ATTCCCGCTAGATTTTCTGGTTCTGGCAGCGGGACCGAGTTTACCCTTACGATAAGTAGCCTCCAG |
| | AGCGAGGATTTCGCAGTGTACTATTGTCAACAGCGCTCTAACTGGCCACCTAGCATAACGTTCGGG |
| | CAGGGAACTCGTCTGGAAATCAAG (SEQ ID NO: 764) |
| TMPRSS4 | GAGGTTCAACTGCTCGAGTCTGGCGGCGGGCTTGTTCAGCCCGGCGGTTCTTTGAGGTTGTCATGT |
| Ab26 scFv | GCCGCGTCTGGGTTTACCTTCTCCTCCTATGCCATGCATTGGGTGCGGCAGGCTCCTGGCAAGGGC |
| (VH-VL) | CTGGAGTGGGTGGCTGTCATCTGGTACGACGGGAGCAGCAAATACTACGCCGATTCCGTGAAAGGC |
| | CGCTTCACCATTTCTCGAGACAACTCAAAGAATACGCTGTACCTCCAGATGAACTCCCTGCGCGCA |
| | GAAGATACCGCTGTGTACTATTGCGCGCGTGGGGAAGTGCGGAGAGGGTTCCAGCACTGGGGTCAG |
| | GGAACACTTGTCACAGTGTCCTCCGGAGGAGGCGGGTCAGGTGGAGGTGGTAGTGGAGGAGGAGGC |
| | AGTGACATTCAGATGACACAGTCTCCTAGTTCACTGTCAGCCAGCGTCGGTGATAGAGTTACAATA |
| | ACTTGTAGGGCCTCGCAGAATGTAGGAAGCTGGCTCGCATGGTATCAACAGAAGCCAGGGAAAGCT |
| | CCCAAGCTGCTGATCTACGCAGCAAGCAGCCTCCAGAGCGGCGTACCATCGAGGTTTTCCGGCAGC |
| | GGAAGTGGCACCGACTTCACCTTAACTATTAGATCTCTACAGCCGGAAGATTTTGCCACCTATTAC |
| | TGCCAACAGAGTTATTCCACTCCCATCACGTTTGGGCAAGGCACTCGGTTAGAGATCAAG |
| | (SEQ ID NO: 765) |
| TMPRSS4 | CAGGTTCAGCTGGTCCAGTCTGGCGCCGAAGTGAAGAAGCCCGGCGCATCCGTCAAAGTGTCGTGC |
| Ab27 scFv | AAGGCCTCCGGATATACATTTTCCCGCTACTACATGCATTGGGTTCGGCAGGCTCCTGGCCAAGGG |
| (VH-VL) | TTGGAATGGATGGGGTGGATGAATCCGAACTCCGGCGATACTGGTTATGCACAGAAATTCCAAGGG |
| | AGGGTAACAATGACCCGCGACACCAGCACATCTACGGTCTACATGGAACTCTCCTCACTGCGAAGC |
| | GAGGATACTGCCGTGTATTACTGCGCTAAGGGAAGGGAGTGGCTGAGATCTCCTTTCGACTATTGG |
| | GGTCAAGGGACTCTTGTGACCGTTAGCAGCGGTGGCGGCGGTAGTGGAGGTGGAGGAAGCGGCGGA |
| | GGAGGATCAGACATTCAGATGACACAGAGCCCTTCTTCACTGTCAGCTTCTGTGGGCGATAGAGTG |
| | ACTATTACCTGTCGTGCCAGTCAGTCAATCAGCACTTGGCTCGCTTGGTATCAGCAAAAGCCAGGG |
| | AAAGCGCCCAAACTGCTGATCTACGCAGCGAGTAGTCTCCAGTCTGGCGTGCCCTCTCGCTTTTCG |
| | GGCTCCGGGTCCGGCACCGATTTCACCCTTACAATTTCAAGCCTACAGCCAGAGGACTTTGCCACC |
| | TATTACTGTCAACAGTTAAGCTCCTACCCATTGACATTCGGGCAAGGGACAAAAGTAGAGATCAAG |
| | (SEQ ID NO: 766) |
| TMPRSS4 | CAGGTTCAACTGGTACAGAGCGGCGCCGAAGTGAAAAAACCCGGCGCGAGCGTGAAAGTGTCCTGC |
| Ab28 scFv | AAGGCCTCCGGCTACACCTTCACTGGATATTACATGCATTGGGTCCGGCAGGCTCCCGGGCAGGGC |
| (VH-VL) | CTGGAGTGGATGGGATGGATGAATCCAAACTCCGGAAATACCGGTTACGCCCAGAAATTCCAGGGA |
| | CGAGTTACAATGACTCGTGATACATCCACTAGCACCGTCTACATGGAACTCTCTTCTCTACGCTCC |
| | GAGGACACCGCAGTGTACTATTGCGCTAGGCTCAGAGCGAAGGGCGGCGGTTTTGACTATTGGGGT |
| | CAGGGTACACTTGTTACTGTGTCAAGTGGCGGAGGAGGGTCTGGAGGAGGCGGTAGTGGCGGTGGC |
| | GGTTCTGACATCCAGATGACCCAGTCACCCTCTTCACTGTCAGCCAGCGTAGGCGATAGAGTCACT |
| | ATTACCTGTAGGGCTTCGCAAGGGATTGGAAACTATTTGGCTTGGTATCAACAGAAGCCCGGGAAG |
| | GCACCTAAACTGCTGATCTACGCAGCAAGCAGCTTAGAAAGCGGAGTGCCGAGTCGCTTTAGCGGG |
| | TCCGGGTCTGGCACAGATTTCACGCTTACAATAAGTAGTTTGCAGCCAGAGGATTTTGCCACGTAC |
| | TATTGTCAACAGGGCTACCGGTTCCCACCTACCTTTGGGCCTGGGACAAAGGTGGACATCAAG |
| | (SEQ ID NO: 767) |
| TMPRSS4 | CAGGTTCAGCTCGTACAATCTGGGGCAGAAGTGAAAAAGCCCGGCGCCAGCGTTAAGGTGTCCTGC |
| Ab29 scFv | AAAGCCAGCGGCTATACCTTTGCAAATTACAACATCCACTGGGTGCGGCAAGCACCTGGGCAGGGC |
| (VH-VL) | CTGGAGTGGATGGGGTGGATGAATCCAAACTCCGGCAATACCGGTTACGCTCAGAAATTTCAAGGA |
| | CGGGTGACCATGACCAGGGACACTAGCACATCAACTGTGTACATGGAGCTAAGCAGTCTGCGAAGC |
| | GAAGATACCGCTGTCTACTATTGCGCTCGCCCACGATATTCATCTGGGTGGTATGGGTGGTATTTT |
| | GACCTGTGGGGCAGAGGTACACTTGTAACAGTGTCCAGTGGAGGCGGAGGATCCGGTGGTGGCGGA |
| | AGTGGAGGCGGTGGTTCTGACATTGTCATGACGCAGAGTCCGTTGTCCCTGCCCGTGACACCTGGG |
| | GAACCAGCGTCCATATCTTGTAGATCATCACAGTCCCTCCTCCATTCGAACGGCTACAACTACTTA |
| | GATTGGTACTTGCAGAAGCCCGGGCAATCGCCTCAGCTCCTGATCTACTTAGGATCTAATAGGGCC |
| | TCTGGAGTGCCAGATCGCTTCTCAGGCAGCGGGAGCGGCACAGATTTCACGCTGAAAATTAGTCGT |
| | GTTGAGGCCGAAGACGTAGGCGTCTACTATTGTATGCAGAGCACTTATTGGCCTCCAACTTTCGGG |
| | CAGGGAACAAAGCTTGAGATCAAG (SEQ ID NO: 768) |
| TMPRSS4 | CAGGTTCAACTGGTCCAGTCGGGTGCCGAGGTGAAAAAGCCCGGAGCGTCAGTGAAAGTGTCCTGC |
| Ab30 scFv | AAGGCTTCTGGCTATACATTCACGACTTATTACATGCATTGGGTGCGGCAGGCACCAGGCCAAGGG |
| (VH-VL) | CTAGAATGGATGGGGTGGATGAATCCGAACTCCGGAAACACAGGCTACGCCCAGAAGTTCCAAGGG |
| | CGGGTAACAATGACCCGAGATACCAGCACCAGCACGGTCTACATGGAGCTCTCCTCACTGCGCTCC |
| | GAAGATACCGCAGTGTACTATTGTGCCCGCGCTAGGACCTGGCTGCTGTCTCCATTTGACTATTGG |
| | GGACAAGGGACTCTTGTGACCGTTAGTAGCGGTGGAGGAGGATCTGGTGGCGGCGGGTCCGGCGGT |
| | GGAGGTTCAGAAATTGTTATGACTCAGAGTCCTGCCACCCTGAGTGTAAGTCCTGGGGAGAGGGCA |
| | ACTCTGAGTTGTAGAGCCTCCCAGTCTGTGGGCAGATATTTGGCCTGGTACCAGCAGAAGCCTGGG |
| | CAGGCTCCCAGGCTCCTCATCTACGGCGCGTCCACCAGAGCAACCGGGATTCCAGCTCGTTTTTCA |
| | GGCAGCGGCTCTGGCACAGAGTTCACGTTGACTATAAGCAGCTTACAGTCTGAGGACTTCGCCGTC |
| | TATTACTGCCAGCACTATGACAGCTCACCCATGTACACTTTTGGGCAGGGAACAAAACTTGAAATC |
| | AAG (SEQ ID NO: 769) |
| TMPRSS4 | CAGGTCCAGCTGGTGCAGTCTGGGGCAGAAGTGAAAAAACCCGGAAGCAGCGTAAAGGTGTCCTGC |
| Ab31 scFv | AAGGCCTCCGGTTACACCTTCCGCGGGTCTGGCATCTCCTGGGTCCGGCAAGCTCCTGGGCAAGGG |
| (VH-VL) | TTGGAGTGGATGGGGATTATCTACCCAGCTGACAGCGAGACACGCTACAGCCCGAGTTTTCAGGGC |
| | CGAGTGACCATTACCGCGGATGAGTCTACTTCAACTGCCTATATGGAACTCTCTAGTCTCCGGTCC |
| | GAGGACACTGCGGTGTACTATTGTGCAAGGGAGAGTTCCTCCTGGGATTATTTCGATTATTGGGGA |
| | CAAGGAACACTTGTAACAGTGTCAAGCGGCGGCGGAGGATCTGGAGGCGGAGGTTCTGGAGGTGGA |
| | GGTTCAGAAATAGTTATGACTCAGTCGCCTGCCACACTGAGTGTCTCGCCCGGCGAAAGGGCTACA |
| | CTGTCTTGCAGAGCCTCCCAAAGCGTTAGATCATACCTGGCATGGTATCAGCAAAAACCTGGCCAG |
| | GCTCCAAGGCTGCTCATATACGGCGCCTCAACCAGAGCCACCGGCATTCCAGCCCGTTTTTCAGGG |
| | AGTGGTAGCGGGACCGAGTTCACTCTTACGATCAGCTCCCTACAGAGCGAGGACTTCGCAGTGTAT |
| | TACTGTCAACAGCACGGCAGTTTGCCCTTAACCTTTGGTCAAGGGACGAAAGTCGAAATCAAG |
| | (SEQ ID NO: 770) |
| TMPRSS4 | CAGGTTCAGTTGGTGCAGAGCGGCGCGGAGGTCAAAAAGCCTGGGAGCAGCGTAAAAGTGTCCTGT |
| Ab32 scFv | AAGGCCTCCGGCGGCACATTCTCCTCATACGCTATATCCTGGGTCCGGCAGGCTCCTGGGCAGGGC |
| (VH-VL) | TTGGAATGGATGGGTCGGATTAATCCTAGCGGCGGGAGCACTTCTTATGCCCAAAAGTTTCAAGGG |
| | CGCGTGACCATGACTCGAGATACCAGTACAAGCACCGTCTACATGGAACTTAGTTCACTGAGGTCT |
| | GAGGACACCGCAGTGTACTATTGTGCTAGAGGCCGATACAGTTCGTCGTCTTGGGGTCAGGGTACG |
| | CTTGTGACTGTGTCCTCCGGAGGAGGAGGAAGTGGAGGAGGAGGAAGCGGCGGCGGTGGAAGCGAC |
| | ATTCAGATGACCCAATCTCCATCTTCACTGTCAGCCTCAGTTGGGGATAGAGTCACCATTACATGC |
| | AGGGCCTCTCAAAGCATCTCAACCTACCTGAACTGGTATCAGCAAAAACCCGGGAAAGCACCCAAA |
| | CTGCTCATCTACGCTGCCTCCTCCCTCCAGCGCGGCGTGCCGAGTCGTTTCTCTGGGTCAGGGAGC |
| | GGTACAGACTTTACGCTGACTATCTCCTCCCTACAGCCAGAGGATTTTGCAACTTATTACTGCCAG |
| | CAGTCTTATACTACACCCTTAACCTTCGGCGGCGGCACAAAGGTTGAAATCAAG |
| | (SEQ ID NO: 771) |
| TMPRSS4 | CAGGTCCAGCTTGTCCAGAGCGGCGCCGAAGTTAAGAAGCCTGGGGCGTCCGTAAAAGTGTCCTGC |
| Ab33 scFv | AAGGCCTCCGGATATACTTTTTCTAACTACTACATGCATTGGGTGCGACAGGCACCCGGCCAGGGT |
| (VH-VL) | CTGGAGTGGGTGGGCTGGATGAACCCGAAAAGCGGGAATACTGGTTATGCACAGAAATTTCAAGGG |
| | CGGGTGACAATGACCAGGGACACGAGCACGAGCACAGTTTACATGGAACTCAGTTCACTGCGCTCG |
| | GAGGATACCGCCGTCTACTATTGTGCCAGAGGCCGGACCTGGATTCAGTCCTCGCTGGGTTATTGG |
| | GGTCAGGGAACTCTTGTGACAGTGTCCAGTGGTGGCGGAGGATCAGGCGGAGGAGGGTCTGGAGGC |
| | GGAGGCTCAGACATTCAAATGACCCAGTCACCCAGCTCATTGTCCGCCTCTGTAGGCGATAGAGTG |
| | ACTATTACTTGTAGGGCTTCTCAGTACATCTCTCGCTGGTTGGCTTGGTATCAGCAAAAGCCAGGG |
| | AAAGCACCAAAACTCCTGATCTATGGGAGTTCTACCCTACAATCCGGCGTTCCATCTCGTTTCTCC |
| | GGGAGTGGCAGCGGAACCGATTTCACCCTCACGATAAGCAGCTTACAGCCCGAGGACTTCGCTACA |
| | TATTACTGCCAACAGTACTACAGTACACCTTTCACCTTTGGCCCTGGGACAAAGCTGGAAATCAAG |
| | (SEQ ID NO: 772) |
| TMPRSS4 | CAGGTCCAGCTCGTCCAGAGCGGCGCCGAAGTGAAAAAACCCGGAGCTTCAGTGAAAGTTTCCTGC |
| Ab34 scFv | AAAGCCTCCGGTTATACCTTCACTGGTTACTACATTCACTGGGTCCGGCAGGCTCCAGGCCAAGGG |
| (VH-VL) | TTGGAGTGGATGGGGTGGATGAATCCACATAGTGGCAACACCGGATACGCCCAGAAATTCCAAGGG |
| | CGGGTTACAATGACACGTGATACCTCTACTTCTACTGTGTATATGGAACTCAGCTCGCTGCGCTCT |
| | GAGGATACCGCTGTGTACTATTGCGCCAGGGAGGGCGGTCGATACAGTTCTGGCAGACTGGGGTAT |
| | TGGGGACAAGGGACACTTGTCACAGTATCCAGCGGAGGAGGAGGATCAGGCGGAGGAGGCTCGGGA |
| | GGCGGTGGTTCAGACATTCAGATGACTCAGAGTCCCAGCTCACTGTCAGCTTCTGTGGGCGACAGA |
| | GTGACCATTACATGCCGCGCAAGTCAAGGGATCTCCTCCTGGTTGGCGTGGTATCAACAGAAGCCC |
| | GGCAAGGCACCTAAGCTGCTGATCTACGCAGCCAGCACCCTACAGACTGGGGTGCCTTCTAGGTTT |
| | AGCGGTAGTGGCAGCGGGACTGACTTCACGCTTACGATCAGCTCCTTACAGCCGGAAGATTTTGCC |
| | ACCTACTATTGTCAACAGTCCAAATCCATACCTATAACCTTTGGCGGCGGGACAAAGGTTGAGATC |
| | AAG (SEQ ID NO: 773) |
| TMPRSS4 | CAAGTGCAACTGGTGCAGAGCGGCGCTGAGGTTAAAAAGCCGGGCGCCAGCGTCAAAGTGTCCTGC |
| Ab35 scFv | AAGGCCTCCGGTTACACGTTCACCGGCTACTACATGCATTGGGTCCGGCAGGCACCAGGCCAGGGC |
| (VH-VL) | CTGGAATGGATGGGGAAAATCTCAGCCCACTCTGGGGAAACCAAGTATGCTCAGAACGTGCAAGGC |
| | CGAGTCACAATGACTAGGGACACGAGCACTTCGACCGTCTACATGGAGCTGTCTAGCCTACGGAGT |
| | GAAGATACCGCAGTGTATTACTGCGCAAGGGCGAACTACTATGGGGATTATGTAAACTACTATTAT |
| | GGGATGGACGTCTGGGGACAAGGGACTACCGTGACAGTGTCCTCTGGTGGTGGCGGAAGCGGAGGA |
| | GGAGGGTCAGGTGGAGGCGGGTCAGACATTCAGATGACACAGTCTCCAAGCTCCCTGTCCGCTTCA |
| | GTTGGAGATCGCGTTACAATTACCTGTCAGGCCTCCCAGGACATCAGTAATTACCTGAATTGGTAC |
| | CAGCAGAAACCCGGCAAAGCTCCCAAACTTCTCATATACAAGGCCTCCAGCCTCGAGAGCGGCGTG |
| | CCTAGTAGATTTTCTGGTTCTGGGAGTGGCACAGATTTCACCTTGACCATTTCAAGTTTGCAGCCT |
| | GAGGACTTCGCCACTTATTACTGTCAACAGACTTATACGATACCCATCACATTTGGGCAGGGAACT |
| | CGTTTAGAGATCAAG (SEQ ID NO: 774) |
| TMPRSS4 | GAAGTGCAGCTGCTCGAAAGCGGCGGCGGGCTGGTGCAGCCTGGAGGTTCATTACGGTTGTCATGC |
| Ab36 scFv | GCAGCGAGCGGCTTCACCTTCTCCTCCCGCGCTATGAGTTGGGTGCGACAGGCACCTGGGAAAGGC |
| (VH-VL) | CTGGAGTGGGTATCCAGGATTAATTATGATGGGTCTGCCACAACTTATGCCGACTCTGTTAAGGGC |
| | CGATTTACCATATCCCGCGACAATTCCAAAAACACGCTGTACTTGCAGATGAACTCGCTTAGAGCT |
| | GAGGACACCGCGGTGTACTATTGCGCCAGAGGCATAACTATTTTTGGGGTCTTCGATTACTGGGGA |
| | CAAGGGACACTTGTAACCGTGTCCTCCGGAGGAGGTGGATCAGGAGGCGGCGGTTCTGGCGGAGGA |
| | GGGAGTGACATTCAGATGACTCAGAGCCCATCTTCGCTGTCAGCTAGTGTTGGGGATAGAGTCACC |
| | ATCACCTGTAGGGCTTCTCAGTCAATCTCTACATGGCTCGCCTGGTATCAACAGAAGCCAGGCAAG |
| | GCACCCAAACTGCTGATCTACCGGGCCAGCAACCTCCAGAGCGGCGTGCCGAGTCGTTTTAGCGGC |
| | TCTGGAAGTGGTACTGATTTCACGCTCACCATCTCCAGCCTACAGCCCGAGGACTTTGCCACATAT |
| | TACTGTCAACAAAGCTACAGCACACCCTTAACTTTCGGCGGAGGCACAAAGGTCGAAATCAAG |
| | (SEQ ID NO: 775) |
| TMPRSS4 | GAAGTCCAACTGCTCGAATCTGGCGGCGGCTTGGTTCAGCCTGGCGGGAGCTTGCGGCTCTCATGT |
| Ab37 scFv | GCTGCCAGCGGGTTCACCTTCTCCTCCTATGCCATGCATTGGGTTCGCCAGGCACCCGGCAAGGGC |
| (VH-VL) | TTAGAGTGGGTGTCTTACATAAGTAGTAGTGGCAGCACCGTGTACTACGCCGATTCTGTTAAAGGG |
| | AGGTTCACCATCTCCCGGGATAATAGCAAGAATACGCTGTACCTCCAGATGAACTCCCTGAGAGCA |
| | GAGGACACCGCCGTGTACTATTGCGCCAGAGTATCTAACGTCACTCCCAGGAGCGGGTTTGGCTAT |
| | TGGGGTCAGGGAACGCTTGTAACAGTGTCCAGTGGAGGTGGAGGAAGCGGCGGAGGTGGATCGGGA |
| | GGCGGAGGTTCAGACATTCAGATGACTCAGAGCCCGAGTTCACTGTCAGCTTCGGTCGGAGATCGC |
| | GTGACCATAACTTGCAGGGCTTCTCAGTCAATCAGCCGATACCTGAACTGGTATCAACAGAAGCCT |
| | GGGAAAGCGCCTAAGCTGCTGATCTACTCAGCATCCACTCTCCAAAGCGGCGTGCCCTCCCGTTTT |
| | AGCGGCTCTGGGTCTGGGACAGACTTCACACTAACAATAAGTAGTTTACAGCCAGAGGACTTTGCT |
| | ACCTATTATTGTCAACAGGCCCACTCTTTCCCGCCATCCTTTGGGCAGGGTACAAAACTTGAAATT |
| | AAG (SEQ ID NO: 776) |
| TMPRSS4 | CAAGTGCAGCTGGCTCAGTCTGGGGCAGAAGTCAAAAAACCTGGCGCCTCTGTAAAAGTGTCCTGC |
| Ab38 scFv | AAGGCCTCCGGCTATACCTTCACCCGGCACTACATCCAGTGGGTGCGGCAGGCACCTGGACAAGGC |
| (VH-VL) | TTAGAGTGGATGGGGTGGATTAATCCCAACTCCGGCAATACGGGCTATGCCCAAAAATTCCAAGGG |
| | CGCGTTACCATGACTCGAGATACGTCCACATCTACGGTCTACATGGAACTGAGTTCCTTGCGCTCG |
| | GAGGACACAGCGGTGTATTACTGCGCTAGAGGCAGGCAATGGCTCCGTGGGGAATACTTCCAGCAC |
| | TGGGGACAAGGGACCCTTGTCACAGTTTCCAGCGGAGGTGGCGGGTCAGGTGGCGGTGGATCAGGC |
| | GGAGGAGGAAGTGACATCCAGATGACCCAGTCACCATCTTCCCTGTCAGCGAGCGTGGGCGACAGA |
| | GTAACTATTACCTGTCAGGCTAGTCAAGACATTAGCAGATACCTCAACTGGTATCAGCAAAAGCCC |
| | GGGAAGGCACCCAAGCTGCTCATCTACGGTGCCAGCAACCTGCTGAGCGGCGTGCCTAGCAGGTTT |
| | TCTGGAAGTGGTTCTGGGACAGATTTCACTCTTACAATAAGTAGCCTACAGCCGGAGGATTTTGCC |
| | ACCTACTATTGTCAACAAACTCATACTACTCCATATACCTTTGGGCAAGGCACAAGGTTAGAGATC |
| | AAG (SEQ ID NO: 777) |
| TMPRSS4 | CAAGTGCAGCTGGTACAGAGCGGCGCAGAGGTCAAAAAGCCTGGCGCGAGCGTCAAAGTGTCCTGC |
| Ab39 scFv | AAGGCCTCCGGCGGGAGTTTTAGCGGCTATGCTGTGTCCTGGGTTCGGCAGGCGCCTGGGCAGGGT |
| (VH-VL) | TTGGAGTGGCTGGGCGTAATTAATCCATCCGATTCTTGGACCGCCTTCGCTCAGAAATTTCAGGGC |
| | CGCGTTACTATGACTCGAGATACTTCTACTTCTACCGTCTACATGGAACTTAGTAGTCTCAGGTCT |
| | GAGGACACGGCAGTGTACTATTGCGCTAGGGAACGCGAGGATGATGCCTTCGACATCTGGGGACAA |
| | GGGACCACGGTCACAGTGTCCTCCGGCGGTGGAGGAAGCGGAGGAGGAGGTTCAGGAGGCGGAGGG |
| | TCAGACATACAGATGACACAGTCGCCCTCATCACTGTCAGCCTCTGTTGGGGATAGAGTGACCATT |
| | ACCTGTAGAGCTTCGCAAGGGATTAGGAACTGGTTGGCCTGGTACCAGCAGAAGCCCGGCAAAGCA |
| | CCAAAGCTGCTGATCTACAGAGCAAGCACGCTACAGAGCGGCGTGCCTAGCCGTTTTAGCGGGAGC |
| | GGTAGTGGCACAGACTTCACCCTTACCATCTCCTCCTTACAACCCGAAGACTTCGCCACATACTAT |
| | TGTCAACAGAGTTATACAACTCCGTTTACATTCGGGCAGGGTACAAAGCTCGAGATCAAG |
| | (SEQ ID NO: 778) |
| TMPRSS4 | CAAGTGCAGCTCGTTCAGTCTGGGGCAGAAGTGAAAAAACCTGGGGCGAGTGTCAAAGTGTCCTGC |
| Ab40 scFv | AAGGCCTCAGGCGGCACATTCTCAAGTTATGCCATCTCCTGGGTTCGGCAGGCTCCAGGCCAGGGC |
| (VH-VL) | TTGGAATGGATGGGGATAATTAATCCGCGTGGCGGGTCAACCAACTACGCTCAGAAGTTCCAAGGG |
| | CGGGTAACAATGACCAGAGATACCAGCACTAGCACCGTCTACATGGAGCTCAGCTCCCTACGCTCA |
| | GAAGATACCGCCGTGTACTATTGTGCAAGGGAAGGTTCTAGCTGGTATTATGACGCCTTTGATATA |
| | TGGGGACAAGGAACTATGGTCACAGTGTCCTCCGGCGGTGGAGGATCTGGTGGAGGCGGAAGTGGA |
| | GGTGGAGGGAGTGACATTCAGATGACTCAGAGCCCTAGCTCGCTGTCGGCTTCTGTAGGCGATAGA |
| | GTGACTATTACTTGCCGAGCTTCTCAGAGTATTTCCAGCTACCTGAATTGGTACCAGCAGAAGCCC |
| | GGCAAAGCACCCAAGCTGCTGATCTACGCGGCCTATAACCTTCAATCTGGGGTGCCATCAAGGTTC |
| | AGCGGCTCCGGGTCTGGCACAGACTTCACCCTTACAATCAGTAGCTTACAGCCCGAGGACTTTGCC |
| | ACCTACTATTGTCAACAGTCCTACTCAATCCCTTTTACGTTTGGAGGTGGCACGAAGGTTGAGATC |
| | AAG (SEQ ID NO: 779) |
| TMPRSS4 | CAGGTCCAGCTCGTACAGAGTGGCGCAGAGGTCAAAAAACCGGGCGCCAGCGTTAAAGTGTCCTGC |
| Ab41 scFv | AAAGCCTCCGGTGGCACATTCTCCTCCTACGCTATCTCCTGGGTTCGGCAGGCTCCAGGTCAAGGG |
| (VH-VL) | CTGGAATGGATGGGGTGGATGAATCCCAACTCCGGCGATACACATTATGCCCAAAAGTTTCAGGGC |
| | CGCGTAACCATGACTAGGGACACCTCTACGTCAACTGTCTACATGGAGCTGTCATCACTAAGATCT |
| | GAAGATACTGCCGTGTACTATTGTGCCCGAGAAGGGTCTAGTTGGTACTACGATGCTTTTGATATT |
| | TGGGGACAAGGCACCCTTGTGACTGTGTCGTCCGGAGGTGGAGGCTCCGGAGGAGGAGGGTCAGGT |
| | GGAGGAGGCTCTGACATTCAGATGACACAGAGCCCTAGCAGTCTGTCAGCCAGCGTTGGCGACAGA |
| | GTGACCATCACCTGTAGGGCTTCTCAGTCAATAAGCCGGTGGTTGGCATGGTATCAACAGAAGCCC |
| | GGGAAGGCACCCAAGCTGCTGATCTACGCAGCGAGCACCCTCCAGACCGGCGTGCCATCGCGTTTT |
| | AGCGGGTCTGGCAGCGGCACAGACTTCACCCTTACAATTAGTAGTTTACAGCCTGAGGACTTTGCG |
| | ACTTACTATTGCTTGCAGCACAGCTCTTATCCTTTCACGTTCGGGCAAGGGACAAAGGTGGAGATC |
| | AAG (SEQ ID NO: 780) |
| TMPRSS4 | CAGGTCCAGCTCGTCCAGTCTGGGGCTGAAGTGAAAAAACCCGGCGCCAGCGTTAAAGTGTCCTGC |
| Ab42 scFv | AAGGCCTCAGGCTATTCCTTCACCTCCCACTACATGCATTGGGTTCGGCAGGCTCCTGGCCAAGGG |
| (VH-VL) | TTAGAATGGATGGGTTGGATGAACCCGAACTCCGGCAATACCGGTTATGCTCAGAAGTTCCAAGGG |
| | CGAGTCACAATGACTCGTGATACTAGCACTTCTACAGTGTATATGGAGCTGAGTAGTCTGCGCAGT |
| | GAAGATACTGCCGTATATTACTGTGCACGGCTTGGGCAGCAGCTGGATTACTGGGGACAAGGGACT |
| | CTTGTGACCGTGTCCTCCGGCGGCGGAGGTTCAGGAGGCGGAGGATCAGGAGGAGGAGGCTCTGAC |
| | ATTCAGATGACCCAGTCGCCCTCGTCACTGTCAGCGAGTGTGGGCGATAGAGTAACCATCACCTGT |
| | AGGGCATCTCAGAGCATCCGCAATTACCTCAACTGGTACCAGCAGAAGCCAGGGAAAGCACCCAAG |
| | TTGCTGATTTACGAGGCCTCCAGACTACAGTCTGGTGTGCCGAGCAGGTTTAGCGGTTCCGGGTCT |
| | GGCACAGACTTCACGCTCACAATAAGTAGCTTGCAGCCAGAGGACTTTGCCACCTATTACTGCCAA |
| | CAAAGCTATAGCGCTCCACCTACATTTGGGCCTGGCACGAAGGTTGACATCAAG |
| | (SEQ ID NO: 781) |
| TMPRSS4 | CAAGTGCAGCTCGTCCAGTCTGGGGCTGAAGTGAAAAAACCGGGTGCCTCCGTCAAGGTGTCCTGC |
| Ab43 scFv | AAGGCCTCAGGCTACACTTTCATAGGGTACTACATGCATTGGGTACGGCAGGCACCTGGGCAAGGT |
| (VH-VL) | CTAGAATGGATGGGGCGGATTAATCCCAACTCCGGCGAAACTAACTATGCTCAGAAGTTTCAGGGC |
| | CGAGTAACCATGACTAGGGACACCAGCACCAGCACGGTCTACATGGAGCTGTCATCTTTGAGGAGC |
| | GAGGACACCGCTGTGTACTATTGCGCTAGAGTTAGAGTGCGCGGCGTGATACACCCTGGCTTTGAT |
| | CCCTGGGGTCAGGGAACACTTGTCACCGTGTCCTCCGGAGGCGGAGGATCTGGCGGAGGAGGCTCT |
| | GGTGGTGGTGGCAGTGACATTCAGATGACACAGAGTCCCAGCTCCCTGTCAGCCTCGGTTGGGGAC |
| | CGCGTCACCATCACCTGTCAGGCCTCACAAGATATTAGTAATTACCTGAACTGGTATCAGCAAAAA |
| | CCTGGCAAGGCACCAAAGCTGCTGATCTACGCGGCAAGCTCCTTACAGTCTGGGGTGCCCTCGCGT |
| | TTTAGCGGAAGTGGAAGTGGCACAGATTTCACGCTTACTATCTCAAGCCTCCAGCCTGAGGATTTC |
| | GCCACTTATTATTGTCAACAGTCTTATAGCACACCAGTGACATTCGGGCCAGGGACAAAAGTTGAC |
| | ATCAAG (SEQ ID NO: 782) |
| TMPRSS4 | CAAGTGCAGTTAGTTCAGTCTGGTGCGGAGGTGAAAAAACCTGGGGCATCTGTGAAAGTGTCGTGC |
| Ab44 scFv | AAGGCCAGCGGCTATACCTTTCGGAACTACTACATCCACTGGGTCCGCCAGGCTCCTGGTCAGGGC |
| (VH-VL) | CTAGAATGGATGGGCAGGATTAATCCAAACTCAGGCGGCACAAACTACGCCCAGAAGTTTCAGGGA |
| | CGTGTGACTATGACTAGGGATACCTCCACCTCCACCGTCTACATGGAACTGAGTAGTCTCAGATCT |
| | GAGGATACTGCTGTGTACTATTGCGCCCGCGCCAGAATTGCTGTCGCCGTTTCCGGGTTCGGCTAT |
| | TGGGGTCAGGGAACATTGGTAACAGTGTCAAGTGGTGGCGGCGGAAGTGGCGGAGGAGGATCTGGT |
| | GGCGGTGGATCTGACATTCAGATGACTCAAAGCCCATCATCCCTGAGTGCCTCTGTGGGCGACCGG |
| | GTCACAATAACCTGTCAGGCATCACAGGACATCAGCAATTACCTGAATTGGTATCAGCAAAAGCCC |
| | GGGAAAGCTCCCAAGCTGCTGATATACGCAGCGAGCAGCCTCCATAGCGGAGTACCTTCTCGATTC |
| | AGCGGGTCCGGGTCCGGGACCGATTTCACTCTTACAATCAGCTCATTGCAGCCCGAAGATTTTGCA |
| | ACCTATTATTGTCAAGAGTCCTCGTCCTTTCCGTACACGTTCGGGCCAGGGACGAAAGTTGACATC |
| | AAG (SEQ ID NO: 783) |
| TMPRSS4 | CAGGTCCAGCTCGTCCAGAGTGGCGCGGAAGTGAAAAAGCCTGGCGCCAGCGTAAAAGTGTCCTGC |
| Ab45 scFv | AAGGCCTCCGGCTATACCTTTTCACGGTGGTATATGCATTGGGTCCGGCAGGCACCAGGCCAAGGG |
| (VH-VL) | CTGGAATGGATGGGTCGCATTAATCCCAACTCCGGCGGCACTAACTATGCTCAGAAATTCCAAGGG |
| | CGAGTAACTATGACTAGGGACACATCTACCAGCACAGTTTACATGGAGCTGTCAAGTTTGAGGTCT |
| | GAGGATACCGCCGTGTACTATTGCGCCAGAGTTGGCGGTTATGGGTGGTTTGATCCTTGGGGACAA |
| | GGGACCCTGGTGACAGTGTCCTCCGGCGGAGGAGGAAGTGGCGGAGGAGGATCTGGCGGTGGTGGT |
| | AGCGACATTCAGATGACGCAGAGCCCATCTTCCCTATCCGCTTCGGTTGGGGATAGAGTGACTATT |
| | ACCTGTCAGGCAACGCAGGACATACGCAATTACCTGAACTGGTACCAGCAGAAACCCGGCAAGGCT |
| | CCGAAGCTGCTTATCTACGCAACATCATCATTACAAAGCGGAGTGCCATCTCGTTTTTCTGGGAGT |
| | GGGTCAGGCACAGATTTCACCTTGACCATCAGCTCGCTTCAGCCCGAGGACTTCGCCACCTACTAT |
| | TGTCAACAGAGTTACAGCCCTCCGTACACGTTCGGGCAGGGAACAAAGCTCGAAATCAAG |
| | (SEQ ID NO: 784) |
| TMPRSS4 | CAAGTGCAGCTGGTACAGTCAGGCGCCGAAGTCAAAAAGCCCGGAGCCTCGGTTAAAGTGTCCTGC |
| Ab46 scFv | AAGGCCTCTGGTTACACTTTTTCCCGGTATTTCATGCATTGGGTGCGGCAGGCACCTGGCCAGGGT |
| (VH-VL) | TTGGAGTGGATGGGGTGGATTAATCCCAACTCCGGTGGCACCAACTACGCCCAAAAGTTTCAGGGA |
| | AGAGTGACTATGACCAGGGATACCTCAACTTCCACCGTCTACATGGAACTCAGCTCTCTGCGCAGC |
| | GAGGACACCGCTGTGTACTATTGCGCTAGAGTCCGAATTGGGTGGCTCCAGTCACCTCCACTGTAC |
| | TGGGGACAAGGGACACTTGTTACAGTTTCCTCTGGAGGCGGAGGGTCAGGTGGCGGAGGAAGTGGC |
| | GGTGGCGGATCTGACATTCAGATGACACAGTCTCCAAGCAGTTTGAGCGCCAGTGTGGGCGACCGT |
| | GTAACTATCACGTGTAGAGCAAGTCAGTCAATCAGCACATGGCTCGCATGGTATCAACAGAAGCCC |
| | GGCAAAGCTCCAAAACTGCTGATCTACGCGGCGAGCAGTTTACAGTCCGGCGTGCCTTCGAGGTTT |
| | TCTGGGTCCGGGTCCGGGACCGATTTCACCCTTACAATAAGCAGCCTACAGCCCGAGGATTTTGCT |
| | ACGTACTATTGTCAACAGTCTTATGGGTTCCCGTGGACTTTCGGCCAGGGTACAAAGGTCGAAATC |
| | AAG (SEQ ID NO: 785) |
| TMPRSS4 | CAGGTCCAGCTGGTGCAGAGCGGTGCAGAAGTCAAGAAGCCCGGTGCAAGCGTAAAAGTGTCCTGC |
| Ab47 scFv | AAGGCCTCCGGGTACACCTTCACCGGTTATTTCATGCATTGGGTCCGGCAGGCTCCTGGCCAAGGG |
| (VH-VL) | TTGGAATGGATGGGCTGGATGAATCCCAACTCCGGGAATACCGGCTACGCTCAAAAATTTCAAGGG |
| | CGCGTGACCATGACAAGGGATACAAGCACCTCCACCGTGTATATGGAGCTCAGCTCTCTGAGATCA |
| | GAGGATACAGCCGTTTATTACTGCGTTCGAGGGAGGACTTGGATTCAGTCAAGCCTGGGGTACTGG |
| | GGTCAGGGAACGCTTGTGACAGTCTCATCTGGAGGAGGCGGAAGCGGAGGAGGCGGAAGTGGAGGT |
| | GGCGGAAGCGACATTCAGATGACTCAGTCTCCAAGCTCGCTGTCAGCTAGTGTTGGCGACAGAGTA |
| | ACTATCACTTGTCGGGCCTCGCAGTCCATCTCCTCATATCTCAACTGGTATCAACAGAAACCGGGC |
| | AAGGCACCTAAGCTGCTCATTTACGCGGCCTCCTCCCTACAGTCTGGGGTGCCTAGTCGTTTTAGC |
| | GGGTCTGGCTCTGGGACCGACTTCACTCTTACAATAAGTAGTTTGCAGCCAGAAGATTTCGCCACT |
| | TACTATTGTCAACAGAGTTACTCTACGCCCTTAACCTTTGGCGGCGGCACAAAAGTGGAGATCAAG |
| | (SEQ ID NO: 786) |
| TMPRSS4 | CAAGTGCAGCTGGTCCAGTCTGGGGCGGAAGTGAAAAAGCCCGGAGCTAGTGTAAAGGTGTCCTGT |
| Ab48 scFv | AAAGCCAGCGGCTACACCTTCACCGGTTATTACCTGCATTGGGTCCGGCAGGCTCCTGGCCAGGGC |
| (VH-VL) | CTGGAGTGGATGGGCTGGATTTCCGCATATAACGGAAACACAAATTACGCCCAGAACCTGCAAGGC |
| | CGCGTGACCATGACCAGGGACACAAGCACTAGCACTGTCTACATGGAGTTGTCTAGCTTGAGAAGC |
| | GAAGATACCGCTGTGTACTATTGCGCCCGACACTCTTACTCGGGCTCATACTCAACGCTACCCTAT |
| | TATGGGATGGATGTTTGGGGTCAAGGGACAACGGTCACAGTATCCTCTGGAGGCGGTGGCAGCGGA |
| | GGAGGCGGGTCTGGAGGTGGTGGATCAGACATTCAGATGACCCAGTCACCAAGTTCCTTATCCGCA |
| | AGCGTTGGGGATCGTGTTACAATTACTTGCAGGGCCTCGCAAGGGATCTCTAATTATCTCGCTTGG |
| | TACCAGCAGAAACCTGGGAAAGCACCCAAGCTGCTGATCTACACTGCAAGCACACTTTTTCCAGGA |
| | GTGCCGTCAAGATTCTCTGGGTCCGGGAGTGGCACTGACTTCACCCTTACCATCTCCTCCCTCCAG |
| | CCTGAGGACTTTGCCACATATTATTGTCAACAGAGTTACTCCATACCACTCACGTTTGGCGGCGGA |
| | ACAAAaGTtGAAATCAAG (SEQ ID NO: 787) |
| TMPRSS4 | CAGGTCCAGTTGGTACAGAGCGGCGCCGAAGTGAAAAAGCCTGGGGCGTCCGTCAAAGTGTCTTGC |
| Ab49 scFv | AAGGCCTCCGGCTATACATTCACCGGGTACTACATGCATTGGGTGCGGCAGGCACCTGGCCAGGGT |
| (VH-VL) | CTAGAATGGATGGGCCGGATCAATCCCAACTCCGGCGGCACAAACTATGCTCAGAAATTTCAAGGT |
| | CGCGTCACCATGACCCGTGACACAAGTACGAGCACCGTCTACATGGAGCTGTCCTCCCTCAGGAGC |
| | GAGGATACAGCCGTGTACTATTGTGCAAGGGAGCGCGCCGGCTATAGCAGCGGGCAGTTCGATTAT |
| | TGGGGACAAGGGACTCTGGTAACTGTGTCCTCCGGAGGCGGAGGATCAGGCGGAGGAGGCTCAGGA |
| | GGTGGAGGTTCTGACATTCAGATGACTCAATCTCCCTCGTCACTGTCAGCTAGTGTTGGGGATAGA |
| | GTGACTATTACCTGCCGAGCCAGTCAGTCAATATCTAACTGGCTCGCATGGTACCAGCAGAAGCCA |
| | GGGAAGGCTCCCAAACTGCTGATCTACGCCGCGAGCACCCTTCAGAATGGCGTGCCGTCTAGATTT |
| | AGCGGTTCTGGGTCTGGGACCGACTTTACACTTACTATCAGTAGTTTACAACCAGAGGACTTTGCT |
| | ACTTATTACTGTCAACAGAGCTACACCTTCCCTATTACGTTCGGCCAGGGAACAAAAGTTGAAATC |
| | AAG (SEQ ID NO: 788) |
| TMPRSS4 | CAGGTCCAGCTGGTTCAGTCTGGCGCGGAAGTTAAAAAGCCAGGCGCCTCCGTCAAAGTGTCCTGC |
| Ab50 scFv | AAGGCCTCCGGCTATACTTTCACCGGTTATTACATGCATTGGGTGCGGCAGGCACCTGGGCAAGGG |
| (VH-VL) | CTGGAATGGATGGGATGGATTAACCCGAACTCCGGAGGCACACACTATGCCCAAAAGTTTCAGGGA |
| | CGGGTTACAATGACTCGTGACACTTCAACTAGCACCGTCTACATGGAGCTTAGTAGTTTGAGGTCA |
| | GAGGACACCGCTGTGTATTACTGCGCTAGAGTGCGAATCGGGTGGCTGCAGAGTCCACCACTGTAC |
| | TGGGGACAAGGGACTTTGGTAACAGTGTCAAGCGGCGGAGGTGGATCAGGAGGCGGCGGTAGCGGA |
| | GGAGGTGGATCTGACATTCAGATGACCCAGTCGCCGTCCTCCCTATCCGCCAGTGTCGGTGATCGC |
| | GTAACCATTACGTGTAGGGCCTCTCAAGGGATCAGCAATTACCTCGCATGGTACCAGCAGAAACCC |
| | GGGAAGGCACCCAAACTGCTGATCTACGCTACAAGCAGACTCCAGTCAGGCGTGCCCTCTCGCTTC |
| | TCTGGCAGCGGGTCTGGCACCGATTTCACCCTTACAATAAGTAGCCTCCAGCCTGAGGATTTTGCT |
| | ACGTATTATTGTCAACAGAGCTACAAGACTCCCTTAACCTTTGGCGGCGGGACAAAAGTGGAAATC |
| | AAG (SEQ ID NO: 789) |
| TMPRSS4 | CAAGTGCAGCTGGTCCAGAGCGGTGCCGAAGTGAAAAAGCCTGGGGCGTCCGTGAAAGTGTCCTGT |
| Ab51 scFv | AAGGCCAGCGGATATACCTTCACCAACTACTACATGCATTGGGTCCGGCAGGCTCCCGGCCAAGGG |
| (VH-VL) | CTGGAATGGATGGGGTGGATTAATCCAAAATCTGGCGGCACTTCTTATGCACAGAAGTTCCAGGGC |
| | CGCGTTACTATGACTAGGGATACAAGCACCAGCACTGTCTACATGGAACTGTCGAGTTTGAGAAGT |
| | GAGGATACAGCAGTGTATTACTGCGCCAGCGGGAAGCAATGGCTCGTAGGAGGTCGATTCGACTAT |
| | TGGGGTCAGGGAACACTTGTCACCGTTTCATCCGGAGGAGGAGGGTCTGGTGGAGGAGGGTCTGGA |
| | GGTGGCGGGTCAGACATTCAGATGACGCAGAGTCCAAGCTCCTTGTCCGCTTCTGTGGGCGATAGA |
| | GTAACCATTACTTGCAGGGCTTCACAGAGCATCTCTTCATACCTGAACTGGTACCAGCAGAAACCC |
| | GGGAAGGCACCCAAACTTCTCATCTACGCTGCCTCCTCCCTACAATCCGGCGTGCCGAGTCGTTTT |
| | TCAGGCTCGGGCTCTGGCACCGACTTCACACTCACGATAAGTAGTTTACAGCCTGAGGACTTTGCC |
| | ACCTACTATTGTCAACAGAGCTATAGCACACCTCTGACCTTTGGCGGCGGGACAAAGGTTGAGATC |
| | AAG (SEQ ID NO: 790) |
| TMPRSS4 | CAGGTCCAGCTGGTTCAGTCTGGCGCAGAAGTGAAAAAGCCTGGGGCATCTGTAAAGGTGTCCTGC |
| Ab52 scFv | AAGGCCTCCGGATATACCTTCACTAGATATTACATCCACTGGGTGCGGCAGGCACCTGGGCAAGGG |
| (VH-VL) | CTGGAATGGATGGGGTGGATGAATCCGAACTCCGGCAATACCGGGTTTGCCCAAAAACTGCAAGGG |
| | CGAGTAACAATGACCAGGGATACCAGCACAAGCACGGTCTACATGGAGCTCAGCTCCCTCCGCTCT |
| | GAGGACACCGCTGTGTACTATTGTGCCCGCGGTCCCTTTCCTAGAGGACGGCTCGACCTGTGGGGA |
| | CAAGGCACACTTGTCACAGTGTCCTCCGGTGGTGGAGGAAGCGGAGGAGGCGGTTCAGGCGGAGGA |
| | GGCAGTGACATTCAGATGACTCAGTCTCCAAGCTCCTTGTCAGCGAGTGTTGGGGATAGAGTGACA |
| | ATAACTTGCAGGGCTAGTCAGGGTATTAGTCGGTGGCTAGGCTGGTACCAGCAGAAACCCGGGAAG |
| | GCTCCAAAACTGCTGATCTACGGCGCCAGCAACTTGCAGACTGGGGTGCCCTCGCGTTTCTCAGGC |
| | TCAGGCTCTGGGACTGACTTCACCCTTACCATTAGTAGCTTACAGCCCGAAGATTTTGCCACCTAT |
| | TATTGTCAACAGTCATACAGCTCTCCAAGGACGTTCGGCCAGGGTACAAAGGTTGAGATCAAG |
| | (SEQ ID NO: 791) |
| TMPRSS4 | CAGGTCCAGCTGGTCCAGTCAGGCGCCGAAGTGAAAAAGCCTGGGGCGTCCGTGAAAGTGTCCTGC |
| Ab53 scFv | AAAGCCTCCGGCTATACATTTACCCGATACTACATGCATTGGGTGCGGCAGGCTCCAGGCCAAGGG |
| (VH-VL) | CTGGAATGGATGGGGATAATCAATCCCACAGGCGGGTCTACATCGTATGCACAGAAGTTCCAAGGG |
| | CGCGTCACTATGACTCGAGACACCTCTACTAGCACGGTCTACATGGAACTAAGTAGCCTCCGCAGC |
| | GAGGATACCGCCGTGTATTACTGCGCTAGAGGCAGGACCTGGATTCAATCTAGCCTGGGGTATTGG |
| | GGTCAGGGAACACTTGTTACCGTGTCCTCCGGAGGAGGAGGTTCCGGTGGCGGAGGGAGTGGAGGA |
| | GGTGGATCTGACATACAGATGACACAGTCTCCTAGTTCCTTGTCAGCTTCGGTTGGCGATAGAGTA |
| | ACCATTACATGCAGGGCCTCTAGATCAATCAACAGGTGGTTGGCGTGGTATCAACAGAAACCCGGG |
| | AAAGCACCAAAACTGCTGATCTACGGAGCATCAACTTTACAGAGTGGCGTGCCTAGCCGTTTTTCT |
| | GGCAGCGGTAGTGGTACTGACTTCACACTTACGATTAGTAGCCTCCAGCCGGAGGATTTCGCAACA |
| | TACTATTGTCAACAGAGCTACAGCACTCCCACCTTTGGCGGCGGCACGAAAGTTGAGATCAAG |
| | (SEQ ID NO: 792) |
| TMPRSS4 | CAAGTACAGTTAGTGCAGAGCGGAGCCGAAGTTAAAAAACCTGGGGCGTCAGTCAAAGTCTCATGC |
| Ab54 scFv | AAGGCCTCCGGCTATACCTTCACCTCATACTACATGCAGTGGGTTCGGCAAGCTCCCGGGCAGGGC |
| (VH-VL) | CTGGAGTGGATGGGCTGGATGAACCCTAATTCCGGCAATACTGGTTATGCACAGAAGTTCCAGGGC |
| | CGCGTGACTATGACCAGAGATACCTCCACTTCCACCGTCTACATGGAGCTAAGCTCCCTCCGTAGC |
| | GAAGACACTGCTGTGTACTATTGTGCACGAGTGCGCATCGGGTGGCTGCAGAGTCCTCCGTTGTAC |
| | TGGGGTCAAGGGACACTCGTGACAGTGTCCAGCGGTGGAGGTGGATCTGGCGGTGGAGGATCTGGA |
| | GGCGGAGGCTCTGACATTCAGATGACCCAGTCACCTTCTTCACTGTCAGCCTCTGTGGGCGACCGG |
| | GTTACAATTACATGCAGAGCTTCGCAGGGAATCTCCAACTATCTGGCTTGGTATCAGCAAAAGCCC |
| | GGCAAAGCACCCAAGCTCCTTATCTACGCAGCGAGCAGTTTGCAGTCTGGGGTACCCAGTAGGTTT |
| | AGCGGGTCTGGGAGTGGCACAGATTTTACTCTGACGATAAGTAGCCTTCAGCCAGAGGATTTCGCC |
| | ACGTACTATTGTCAACAGTCCTACTCGATTCCATTCACGTTTGGGCCAGGGACAAAAGTCGACATC |
| | AAG (SEQ ID NO: 793) |
| TMPRSS4 | CAAGTGCAGCTCGTTCAGAGCGGCGCGGAGGTCAAGAAGCCTGGCGCCTCAGTCAAAGTCTCTTGC |
| Ab55 scFv | AAGGCCTCCGGCTATACTTTCACCACGTATTACATGCATTGGGTGCGGCAGGCTCCCGGCCAGGGC |
| (VH-VL) | CTGGAATGGATGGGAATTATTAATCCGAGCGGCGGGAGTACAAGCTACGCTCAGAAATTCCAGGGA |
| | CGGGTGACTATGACCCGAGACACCAGCACATCTACTGTCTACATGGAGCTGAGTAGCTTGCGCTCA |
| | GAGGACACCGCCGTGTACTATTGTGCACGCGGGAGGAGCTGGTATAGAAGCAACGTAGACTATTGG |
| | GGACAAGGGACACTTGTAACAGTGTCAAGTGGCGGAGGCGGGTCCGGTGGAGGTGGTTCAGGAGGT |
| | GGAGGTTCTGACATTCAGATGACTCAGAGTCCATCGTCACTGTCAGCCAGCGTTGGGGATAGAGTG |
| | ACCATCACTTGCAGGGCTAGTCAAAGTATCTCCTCCTGGCTCGCATGGTACCAGCAGAAACCTGGG |
| | AAGGCTCCTAAACTGCTGATATACGCAGCGTCCTCCCTTCAGTCTGGAGTGCCCTCGAGATTTAGC |
| | GGCTCTGGCTCCGGCACAGATTTCACCCTAACAATATCCAGCTTGCAGCCCGAAGATTTTGCCACC |
| | TATTACTGTCAACAGTCTTACTCTACACCAAGGACGTTTGGTCAAGGGACCCGTTTAGAAATCAAG |
| | (SEQ ID NO: 794) |
| TMPRSS4 | CAGGTTCAACTGGTCCAGTCTGGGGCAGAAGTGAAGAAGCCTGGAGCTTCTGTTAAAGTGTCCTGC |
| Ab56 scFv | AAGGCCTCCGGTCACACCTTCACTCGATATTACATGCATTGGGTTCGGCAGGCACCTGGCCAGGGT |
| (VH-VL) | TTGGAGTGGATGGGGTGGATTAATCCGAACTCCGGGAATACTGGGGACGCTCAGAAATTTCAGGGC |
| | CGCGTGACCATGACACGGGATACCAGCACCAGCACCGTCTACATGGAACTCAGCTCCCTGCGCTCC |
| | GAAGATACGGCAGTGTACTATTGCGCTAGGGACAGAGGCATAGTGGTGGTGCCCGCTGCCATCGGA |
| | GGCATGGACGTATGGGGACAAGGCACCATGGTCACAGTGTCAAGTGGAGGAGGCGGTTCAGGCGGT |
| | GGCGGGTCTGGTGGTGGAGGATCAGACATTGTCATGACTCAAAGTCCATTGAGTCTGCCAGTGACA |
| | CCTGGGGAGCCCGCGAGCATCTCTTGTAGGAGCAGCCAGTCCCTCCTGCACTCCAACGGCTATAAC |
| | TATCTCGACTGGTACCTACAGAAACCCGGGCAGAGCCCTCAGTTACTGATCTACCTTGGGTCGAAT |
| | AGGGCCTCTGGGGTGCCAGATAGATTCTCAGGATCTGGAAGTGGCACTGATTTCACACTGAAGATA |
| | AGTAGAGTCGAGGCCGAGGATGTTGGCGTCTACTATTGTATGCAGGCCCTTCAGACACCCATTACG |
| | TTTGGCCAAGGCACTCGTCTGGAGATCAAG (SEQ ID NO: 795) |
| TMPRSS4 | CAAGTGCAGCTCGTCCAATCTGGGGCTGAAGTGAAAAAGCCTGGAGCCTCCGTGAAGGTGTCCTGC |
| Ab57 scFv | AAGGCCTCCGGCTACACTTTCACGGGCTATTTCATGCATTGGGTGCGGCAGGCACCCGGGCAGGGA |
| (VH-VL) | CTGGAGTGGATGGGCAGGATTAATCCCAACTCCGGCGGGACAAATTACGCGCAGAAGTTTCAGGGC |
| | CGCGTTACCATGACTAGAGATACCAGCACTTCAACCGTTTACATGGAGCTGAGCAGTCTGCGCAGC |
| | GAGGACACGGCTGTCTACTATTGCGCTAGAGGAAAAGGGCGATATTTCGACCTGTGGGGTAGAGGC |
| | ACACTCGTAACAGTCTCCAGTGGAGGAGGCGGGTCAGGTGGCGGTGGGTCTGGAGGTGGAGGGTCA |
| | GACATTGTTATGACTCAAAGTCCCTTGTCCCTGCCCGTGACTCCTGGCGAACCAGCCTCAATCTCC |
| | TGTCGAAGCTCTCAGAGCCTTCTCCACTCTAATGGCTATAACTATCTGGACTGGTACCTTCAAAAA |
| | CCGGGCCAGAGTCCTCAGCTCCTAATCTACTTGGGATCTAACAGGGCCTCTGGGGTGCCAGATAGG |
| | TTTAGCGGTAGTGGCAGCGGCACAGATTTCACCCTGAAAATTTCGCGGGTAGAAGCAGAGGATGTG |
| | GGTGTCTACTATTGTATGCAGGGAACACATTGGCCAATAACCTTTGGGCAGGGAACCCGTTTAGAG |
| | ATCAAG (SEQ ID NO: 796) |
| TMPRSS4 | CAGGTCCAACTGGTCCAGTCTGGGGCAGAAGTGAAAAAACCCGGCGCCTCCGTAAAAGTGTCCTGC |
| Ab58 scFv | AAGGCCTCCGGCTACACTTTCACCCGATACTATCTCCACTGGGTCCGGCAGGCTCCCGGTCAGGGC |
| (VH-VL) | TTAGAGTGGATGGGGTGGGTTAGTGCATACAATGGAAATACAAACTATGCGCAGAAATTCCAAGGG |
| | CGCGTGACCATGACCCGAGACACCAGCACTTCTACTGTCTATATGGAGCTTTCCTCCCTCAGGAGT |
| | GAGGATACTGCCGTGTACTATTGCGCTAGAGGTTACTGCTCAGGCGGGTCATGTTATTGGTTTGAT |
| | CCCTGGGGTCAAGGGACGCTTGTGACCGTGTCCTCCGGAGGAGGCGGAAGCGGTGGAGGAGGATCA |
| | GGCGGTGGAGGCTCTGACATTGTGATGACCCAGTCTCCGCTGTCACTCCCAGTGACACCTGGCGAA |
| | CCCGCTTCAATAAGTTGTAGAAGCAGTCAGTCTTTGCTGCATAGCAACGGCTACAACTATCTAGAT |
| | TGGTACTTGCAGAAGCCTGGGCAGTCGCCACAACTGCTGATCTACCTGGGCAGCAATAGGGCATCT |
| | GGGGTGCCTGACCGCTTTAGCGGCAGCGGTAGTGGCACAGACTTCACGCTGAAAATTAGCCGTGTA |
| | GAGGCCGAAGATGTTGGGGTCTACTATTGTATGCAGGCCCTCCAGACTCCATTAACATTTGGACAA |
| | GGCACAAAGGTTGAGATCAAG (SEQ ID NO: 797) |
| TMPRSS4 | CAGGTTCAGCTAGTTCAGAGCGGAGCCGAGGTCAAGAAGCCCGGAGCGTCTGTGAAAGTGTCCTGC |
| Ab59 scFv | AAAGCCTCCGGAGGCACATTCTCCTCCTATACTTTGAGTTGGGTTCGGCAGGCACCTGGCCAGGGC |
| (VH-VL) | CTGGAGTGGATGGGATGGATTCACCCGAAAAGCGGCGTGACCAAGAATGCACAGAAATTCCAAGGG |
| | CGGGTGACTATGACCCGAGATACTTCCACGTCTACCGTCTACATGGAACTCAGCTCACTGCGCTCA |
| | GAGGACACCGCTGTGTACTATTGCGCTAGAGGCTGGGTGTACGGCAGGATGGACGCCTGGGGTCAG |
| | GGTACTACGGTCACAGTCAGTAGCGGAGGTGGCGGATCTGGAGGAGGCGGGTCTGGCGGTGGAGGG |
| | TCAGAAATCGTCATGACCCAGTCTCCCGCCACACTGAGTGTATCGCCTGGGGAGCGCGCCACTCTG |
| | AGTTGTAGAGCAAGCCAGAGCGTGTCGTCCAATTACCTGGCTTGGTATCAGCAAAAGCCTGGGCAG |
| | GCACCCAGGTTGCTTATCTACGGCGCGTCAACTAGGGCTACCGGGATACCAGCCCGTTTTTCCGGG |
| | TCTGGTTCAGGGACCGAATTCACGCTCACAATTAGCAGTTTACAGAGCGAAGATTTTGCCGTGTAC |
| | TATTGTCAACAATACGGGACACTTCCATATACCTTTGGCCAAGGCACAAAAGTGGAGATCAAG |
| | (SEQ ID NO: 798) |
| TMPRSS4 | CAGGTCCAGCTCGTGCAGTCCGGAGCAGAAGTTAAGAAGCCTGGCGCGTCTGTGAAAGTTTCCTGC |
| Ab60 scFv | AAGGCCTCAGGTTACTCCTTCACCACCTATTACATCCACTGGGTGCGGCAGGCTCCCGGGCAGGGC |
| (VH-VL) | TTGGAGTGGATGGGTATTATTAACCCATCTGGCGGGTCTACAAGCTACGCTCAAAAGTTTCAGGGT |
| | CGGGTCACTATGACACGAGATACTAGCACATCTACCGTCTACATGGAGCTGAGCAGTCTGCGCAGC |
| | GAGGACACCGCTGTGTACTATTGCGCCCGCGGCGGCTACTATGGCTCCGGATACAATTCAGTCGGT |
| | TATTGGGGACCAGGGACGCTTGTAACAGTATCAAGCGGAGGAGGCGGTAGCGGTGGCGGCGGGAGT |
| | GGAGGAGGTGGAAGTGAAATAGTGATGACCCAGTCACCCGCCACCCTGAGTGTTAGCCCTGGGGAA |
| | AGGGCAACCCTGAGTTGTAGAGCGTCGCAGTCGGTGTCCTCCAACACCCTGGCATGGTATCAGCAA |
| | AAACCCGGGCAGGCTCCTAGGCTCCTAATCTACGGCGCCTCTACTCGTGCCACTGGCATTCCCGCC |
| | AGATTTAGCGGGAGCGGGTCCGGCACAGAGTTTACGCTTACAATAAGTTCCTTGCAGTCAGAAGAT |
| | TTCGCAGTGTACTATTGTCAACAATATGGATCTTCTCCGTTAACGTTCGGGCCAGGCACAAAAGTG |
| | GACATCAAG (SEQ ID NO: 799) |
| TMPRSS4 | CAGGTTCAGTTGGTCCAGTCTGGCGCGGAAGTAAAAAAGCCTGGAGCGTCAGTGAAAGTGTCGTGC |
| Ab61 scFv | AAGGCTAGTGGCTATACCTTCACCAATTACTACATGCATTGGGTGCGGCAGGCACCAGGCCAGGGC |
| (VH-VL) | TTGGAGTGGATGGGCTGGATGAATCCCAACTCCGGGAACACCGGCTATGCTCAGAACCTGCAAGGG |
| | CGAGTCACAATGACCCGAGATACCAGCACTAGCACTGTCTACATGGAGCTGTCCAGCCTGCGCTCA |
| | GAGGACACCGCCGTGTACTATTGTGCCCGCGGGAGGACTTGGTTTAGATCCGGAATGGACGTGTGG |
| | GGTCAGGGAACGACGGTCACAGTGTCCAGTGGAGGTGGTGGCTCAGGCGGAGGAGGGAGTGGAGGC |
| | GGAGGAAGCGAGATTGTTATGACTCAGTCTCCGGCCACACTGAGTGTTTCTCCTGGCGAAAGGGCA |
| | ACTCTCAGTTGCAGAGCATCTCAAAGCGTGTCCTCCTACCTAGCTTGGTATCAACAGAAACCCGGG |
| | CAGGCACCTAGGCTGCTCATCTACGGCGCCTCGACCAGAGCCACCGGGATTCCCGCCCGTTTTAGC |
| | GGGTCTGGGAGCGGGACTGAGTTCACCTTAACAATAAGTAGCCTTCAGTCAGAAGACTTCGCTGTG |
| | TACTATTGTCAACAGTATGATATATCTGTGACGTTTGGGCCAGGCACAAAGGTCGATATCAAG |
| | (SEQ ID NO: 800) |
| TMPRSS4 | CAGGTCCAGCTGGTTCAGTCTGGCGCGGAAGTGAAAAAGCCGGGCGCCTCCGTCAAAGTGTCCTGC |
| Ab62 scFv | AAGGCCTCCGGTTACACCTTCACTGACTATTACATCCACTGGGTCCGGCAAGCACCCGGGCAGGGC |
| (VH-VL) | CTGGAATGGATGGGGTGGATTTCTACTTATAATGGGAACACGAATTATGCACAGAAACTCCAGGGC |
| | CGCGTCACTATGACCCGGGATACAAGCACTAGCACCGTCTACATGGAGCTAAGTAGCTTGCGTAGC |
| | GAGGACACCGCTGTGTATTACTGTGCCAGAGGCATGGTGCGAGGCATGGATGTATGGGGACAAGGA |
| | ACAATGGTTACTGTTTCTAGTGGAGGCGGCGGTTCAGGTGGAGGAGGGTCTGGAGGTGGCGGTTCG |
| | GACATTGTGATGACCCAGTCACCAGATAGCCTTGCAGTGTCCCTGGGAGAAAGGGCTACCATTAAT |
| | TGCAAGAGCAGTCAGTCAGTGCTCTACTCAAGCAACAACAAAAACTATTTGGCTTGGTACCAACAG |
| | AAGCCCGGGCAGCCTCCTAAGCTGCTGATCTACTGGGCCTCTACAAGGGAGTCTGGGGTGCCAGAT |
| | CGCTTTTCCGGGTCCGGCTCCGGGACAGACTTCACGCTTACAATAAGTAGTCTCCAGGCTGAGGAC |
| | GTAGCCGTGTACTATTGTCAACAATACTATACTACACCCTGGACCTTTGGCCAGGGAACCAGATTA |
| | GAGATCAAG (SEQ ID NO: 801) |
| TMPRSS4 | CAAGTGCAGCTGGTGCAGTCTGGAGCGGAAGTGAAAAAACCTGGCGCCAGTGTGAAAGTGTCCTGC |
| Ab63 scFv | AAGGCCTCCGGTTATACTTTCACGGGCTATCGGATGCATTGGGTTCGGCAGGCACCTGGGCAAGGA |
| (VH-VL) | CTAGAGTGGATGGGCGTAATTAATCCAAATACTGGGACCGCTCGCTTTGCTCAGAAGTTTCAGGGA |
| | CGAGTCACAATGACTAGGGATACATCAACCAGCACTGTCTACATGGAGCTGAGCAGCCTCAGGAGC |
| | GAAGACACCGCGGTCTACTATTGTGCTTCTGTGGGCGTCTACTGGTATTTTGACCTGTGGGGTAGA |
| | GGCACACTTGTAACCGTGTCCTCCGGAGGAGGCGGGAGTGGAGGTGGAGGTTCCGGTGGTGGAGGG |
| | AGTGACATTGTTATGACACAGTCTCCCGATAGCCTCGCCGTTAGTCTCGGCGAGCGTGCCACGATA |
| | AACTGCAAATCTTCTCAGTCCGTGTTGTACTCAAGCAACAACAAGAATTATCTGGCATGGTACCAG |
| | CAGAAACCTGGGCAACCACCCAAACTGCTGATCTACTGGGCCTCAACCCGCGAATCTGGGGTGCCG |
| | GATAGATTCAGCGGGAGCGGCTCCGGGACAGATTTCACCCTTACTATCTCGAGTTTGCAGGCTGAG |
| | GACGTTGCCGTCTACTATTGTCAACAGTACTATTCAGCACCCTTAACCTTCGGCGGCGGCACAAAA |
| | GTGGAAATCAAG (SEQ ID NO: 802) |
| TMPRSS4 | CAGGTTCAGCTGGTACAGTCAGGCGCCGAAGTGAAAAAACCGGGTGCCAGCGTCAAGGTGTCCTGC |
| Ab64 scFv | AAGGCCTCCGGCTACACCTTCACCGGATATTACATGCATTGGGTCCGGCAGGCACCCGGCCAAGGG |
| (VH-VL) | CTGGAATGGATGGGGATGATTAATCCTAGTGGTGGCGGGACCACATACGCTCAGAAGTTCCAAGGG |
| | CGGGTTACGATGACTCGAGACACCAGCACGTCTACCGTCTACATGGAACTGTCCAGCCTACGCTCT |
| | GAGGATACTGCCGTGTACTATTGTGCAAGGGACAGGAGATCAATGATTACCTTTCGCACAGATTAT |
| | TGGGGTCAGGGAACTCTCGTTACCGTGTCCTCCGGTGGCGGAGGAAGTGGAGGCGGAGGATCAGGA |
| | GGTGGCGGGTCAGACATTGTAATGACTCAGAGCCCAGATAGTCTTGCAGTGTCCTTGGGCGAGAGG |
| | GCTACAATCAACTGCAAGAGCAGTCAGAGCGTGCTCTACTCGTCTAACAACAAAAATTACCTTGCG |
| | TGGTATCAACAGAAACCCGGGCAGCCTCCCAAACTGCTGATCTACTGGGCTTCTACTAGAGAGTCT |
| | GGCGTGCCTGATCGTTTTAGCGGTTCCGGGTCTGGGACAGACTTCACGTTAACAATAAGTAGCCTC |
| | CAGGCTGAGGACGTCGCCGTGTACTATTGTCAACAGTACTATTCAACACCATATACTTTTGGCCAA |
| | GGCACCAAGTTGGAGATCAAG (SEQ ID NO: 803) |
| TMPRSS4 | CAGGTCCAACTGGTCCAGTCTGGCGCGGAGGTTAAAAAGCCTGGGGCTTCAGTCAAAGTGTCGTGT |
| Ab65 scFv | AAGGCCTCGGGCTATACATTCACCGGCTATTACATGCATTGGGTCCGTCAGGCACCTGGGCAAGGG |
| (VH-VL) | CTGGAATGGATGGGTTGGATGAATCCGAACTCCGGGAATACCGGTTATGCCCAAAAATTCCAAGGG |
| | AGAGTAACTATGACACGAGACACCAGCACTAGCACCGTGTATATGGAACTCAGCTCTCTGAGGAGC |
| | GAGGACACAGCCGTGTATTACTGCGCGGGCCGGAAATGGCTGGGCTTGGATTTCTACAACTGGTTT |
| | GATCCTTGGGGTCAGGGAACTCTTGTAACGGTGTCCAGTGGCGGCGGTGGCTCAGGAGGAGGAGGA |
| | TCTGGAGGAGGCGGAAGCGACATTGTGATGACTCAGAGTCCGGATAGCCTTGCAGTGTCTTTGGGC |
| | GAGCGCGCCACTATTAATTGCAAATCCTCCCAGTCCGTTCTCTACAGCTCAAATAACAAGAACTAT |
| | CTCGCATGGTACCAGCAGAAGCCAGGACAGCCACCAAAACTGCTGATATACTGGGCTAGTACCAGA |
| | CAGTCTGGCGTGCCCGACAGGTTTTCAGGGTCCGGGAGCGGCACAGACTTCACGCTAACGATAAGT |
| | AGTTTACAGGCCGAGGATGTCGCTGTGTATTACTGCCAGCAGTACTACTCTACACCCTGGACCTTT |
| | GGGCAAGGCACAAAGGTTGAAATCAAG (SEQ ID NO: 804) |
| TMPRSS4 | CAGGTTCAACTGGTACAGAGCGGCGCGGAAGTGAAAAAACCCGGCTCGTCAGTTAAAGTGTCCTGT |
| Ab66 scFv | AAGGCCTCCGGCGGCACATTCTCCTCCTACGCTATCTCCTGGGTCCGGCAAGCACCCGGGCAAGGT |
| (VH-VL) | CTGGAGTGGGTGGGTGGCATAATGCCCATATTCGGGACAGCGAATTACGCTCAGAAGTTTCAGGGA |
| | AGAGTGACTATTACCGCCGATGAATCTCCATCTACGGCTTATATGGAACTCTCCAGTCTGCGCAGC |
| | GAGGACACCGCTGTGTACTATTGCGCCACCGGGCGTCGAGAGTTGCTGAACTGGGGTCAGGGAACA |
| | CTTGTTACCGTGTCCAGCGGCGGAGGAGGAAGTGGCGGAGGAGGCTCAGGTGGTGGAGGTTCTGAG |
| | ATTGTGATGACTCAGAGCCCTGCTACACTGAGTGTATCTCCTGGGGAACGGGCCACCCTCAGTTGT |
| | AGAGCCTCTCAGAGCGTCAACTCTAGATTTCTAGCCTGGTATCAGCAAAAGCCGGGCCAGGCACCA |
| | AGGTTGCTCATCTACGGCGCATCAACTAGGGCAACCGGGATTCCTGCCCGCTTCTCAGGCAGCGGG |
| | TCAGGGACTGAGTTTACACTTACGATCAGTAGCTTACAGAGCGAGGACTTTGCCGTCTACTATTGC |
| | ATGCAGGGAACTCACTGGCCATACACCTTCGGCCAAGGGACAAAAGTGGAAATCAAG |
| | (SEQ ID NO: 805) |
| TMPRSS4 | CAGGTCCAGCTAGTTCAGTCTGGGGCAGAAGTCAAGAAACCGGGTAGCTCAGTGAAGGTGTCCTGC |
| Ab67 scFv | AAAGCAAGCGGCTACACTTTCACCTCATATGATATTAATTGGGTGCGACAGGCACCAGGCCAAGGG |
| (VH-VL) | CTGGAATGGATGGGCGGCATCATTCCCATCTTCGGGACAGCCAATTACGCTCAGAAGTTTCAGGGA |
| | CGGGTTACGATTACTGCCGATGAAAGCACCTCTACTGCCTATATGGAGTTAAGCTCTCTGCGCAGC |
| | GAGGACACCGCTGTGTACTATTGTGCCACTACACCAGGCGATGCTTTCGACATATGGGGTCAGGGA |
| | ACAATGGTTACAGTCTCATCTGGAGGTGGAGGATCAGGAGGAGGCGGGTCAGGTGGCGGAGGCAGT |
| | GACATTGTAATGACCCAGTCTCCCGATAGCCTTGCCGTGTCCTTGGGCGAAAGGGCAACCATAAAT |
| | TGCAAGTCCTCCCAGTCCGTCTTGTACTCGAGTAACAACAAAAACTATCTCGCGTGGTATCAGCAA |
| | AAGCCCGGGCAACCTCCTAAACTGCTGATCTACTGGGCTAGTACCAGAGAGAGCGGCGTGCCAGAC |
| | CGTTTTTCTGGGAGTGGTAGCGGGACTGATTTCACCCTTACGATAAGTAGTCTCCAGGCCGAGGAC |
| | GTAGCGGTGTACTATTGTCAACAGTACAGTGACACACCTCTGACCTTTGGGCAAGGCACAAAAGTG |
| | GAAATCAAG (SEQ ID NO: 806) |
| TMPRSS4 | GAAGTGCAACTGCTCGAATCTGGCGGTGGGCTGGTCAAACCTGGTGGATCTCTTCGGCTGTCATGC |
| Ab68 scFv | GCAGCCTCCGGGTTTACCTTCTCCTCCTCCTGGATGCATTGGGTGCGACAGGCACCCGGGAAAGGC |
| (VH-VL) | CTGGAGTGGGTGTCAGCCATCGGGACTGCCGGTGATACCTATTACCCTGGCTCGGTGAAAGGGAGG |
| | TTCACCATTAGCCGGGATGACTCCAAGAATACGCTGTACTTGCAGATGAACTCACTCAAGACTGAG |
| | GACACGGCTGTCTATTACTGTGCCAGAGTGCGACTCGGCCACTTTGACCTGTGGGGACGCGGGACA |
| | CTTGTAACAGTCAGCTCAGGAGGAGGCGGCTCTGGAGGTGGCGGATCTGGTGGAGGCGGCAGTGAC |
| | ATCCAGATGACTCAGTCTCCGAGCAGCTTGAGTGCTTCTGTTGGGGATCGCGTTACCATTACATGC |
| | AGGGCCTCCCAGTCAATCTCTCGTTACTTAAATTGGTATCAGCAAAAACCCGGCAAGGCACCCAAG |
| | CTGCTGATTTACGCGGCGAGCAGTCTCCAAAGCGGAGTGCCATCCAGATTCAGCGGGAGCGGGTCG |
| | GGCACCGATTTTACCCTTACAATAAGTAGTTTGCAGCCAGAGGACTTCGCTACATACTATTGTCAA |
| | CAGTCCTATAGCAACCCACCTACTTTTGGCCAGGGAACTAAGCTAGAAATCAAG |
| | (SEQ ID NO: 807) |
| TMPRSS4 | GAAGTTCAACTGCTCGAGTCCGGCGGTGGGCTTGTTCAGCACGGCGGCTCTTTGCGGCTGTCCTGT |
| Ab69 scFv | GCTGCGAGCGGATTTGCCTTCTCCTCCTACGTCCTGCATTGGGTTCGGCAGGCACCTGGGAAGGGC |
| (VH-VL) | CTGGAGTGGGTGTCCAGTATCAGTTCCAGTAGCAGCTACATCTACTACGCCGACTCCGTGAAAGGG |
| | CGATTCACCATCTCACGCGACAATTCAAAAAACACACTGTACTTGCAGATGAACAGCCTTAGGGCC |
| | GAGGATACTGCTGTGTACTATTGCGCTCGTGGGGATCGCTATCCCGGCCTGCCCAATTATTGGGGT |
| | CAGGGAACATTAGTAACCGTGTCTAGTGGCGGAGGAGGAAGCGGCGGAGGCGGTAGCGGTGGAGGA |
| | GGATCTGACATTCAGATGACCCAGTCTCCAAGTAGCCTAAGTGCAAGCGTCGGCGACAGAGTAACA |
| | ATTACATGCAGAGCTTCGCAAGGGATCTCAAGTTGGCTCGCCTGGTACCAGCAGAAACCTGGGAAA |
| | GCACCTAAGCTTCTCATATACCAGGCCTCAAACAAGGATACTGGGGTGCCATCTAGGTTTTCTGGC |
| | TCTGGCTCGGGCACGGACTTCACCCTCACAATAAGCAGCTTACAGCCCGAAGATTTTGCCACGTAT |
| | TATTGTCAACAGTCATATAGGATTCCGTGGACTTTCGGGCAGGGAACCAAGGTGGAAATCAAG |
| | (SEQ ID NO: 808) |
| TMPRSS4 | GAGGTCCAGCTTCTGGAATCAGGCGGCGGGCTGGTCCAGCCTGGTGGTTCCTTACGGTTGTCCTGC |
| Ab70 scFv | GCTGCCTCCGGGTTTGCGTTTAGTGGCACTTGGATGCAGTGGGTGCGGCAGGCACCGGGCAAGGGC |
| (VH-VL) | CTGGAGTGGGTTTCTGACATTTCCGGGTCCAGTAGGGACACCAACTACGCTGACAGTGTAAAGGGA |
| | CGATTCACAATAAGCAGGGACAACTCTAAAAATACGCTGTACCTCCAGATGAACTCTCTGCGCGCT |
| | GAAGATACAGCCGTGTACTATTGTGCAAAAGATCACTGGGATTCATATGGGTATCTGGACTATTGG |
| | GGACAAGGGACTTTGGTGACAGTGTCTAGTGGAGGAGGAGGATCAGGCGGTGGCGGATCTGGCGGA |
| | GGCGGTTCCGACATTCAGATGACTCAGAGTCCAAGCAGCCTGAGCGCCAGCGTTGGCGATAGAGTG |
| | ACCATTACCTGCAGAGCGTCACAATCCATCTCGGGTTGGCTGGCCTGGTACCAGCAGAAGCCTGGG |
| | AAAGCACCCAAGCTCCTCATCTACGCAGCTTCGACCCTACGTGATGGGGTCCCATCTCGCTTTAGC |
| | GGGAGTGGCTCTGGCACTGATTTCACGCTCACAATAAGCAGCCTTCAGCCCGAGGACTTCGCCACC |
| | TACTATTGTCAACAGGCCAATTCCTTTCCCTTAACCTTCGGACAAGGGACAAAAGTGGAAATCAAG |
| | (SEQ ID NO: 809) |
| TMPRSS4 | GAAGTCCAACTGCTCGAGAGTGGCGGCGGGCTTGTTCAGCCTGGCGGTTCTTTGCGGCTGTCATGC |
| Ab71 scFv | GCCGCGAGCGGCTTCATGTTTGACTATTACGCCATGCATTGGGTTCGACAGGCTCCCGGGAAGGGC |
| (VH-VL) | CTAGAGTGGGTGTCCTTGATCTCCTATGATGGGAGGAACAAGTACTACGCCGACTCAGTGAAGGGC |
| | CGCTTCACAATCAGCCGGGATAATTCCAAAAACACCCTGTACCTCCAGATGAACAGCCTTAGAGCC |
| | GAAGATACCGCTGTCTACTATTGTGCAAGGCCCGGGAGCTATTCTAGATTTCAGCACTGGGGTCAG |
| | GGAACATTAGTGACAGTGTCGTCTGGAGGAGGTGGAAGCGGTGGCGGTGGATCTGGAGGAGGCGGG |
| | AGCGACATTCAGATGACCCAATCGCCAAGTTCCCTGAGTGCTTCAGTCGGCGACCGCGTAACTATT |
| | ACCTGTAGAGCCAGTCAAGGGATTTCTAATAACCTGAATTGGTATCAACAGAAGCCCGGGAAAGCT |
| | CCTAAACTGCTGATATACGCGGCATCCTCCCTCCAGTCAGGCGTGCCTAGTCGTTTTAGCGGGTCT |
| | GGCTCAGGCACTGACTTTACACTCACGATCAGCTCCTTACAGCCGGAGGATTTCGCCACTTATTAC |
| | TGCCAGCAGGCAAATAACTTCCCAATAACGTTCGGGCAGGGAACCAAAGTGGAAATCAAG |
| | (SEQ ID NO: 810) |
| TMPRSS4 | GAAGTGCAGCTGCTCGAGTCGGGCGGCGGGCTGGTGCAACCAGGAGGGTCATTACGGTTGTCATGC |
| Ab72 scFv | GCTGCCTCTGGGTTTACGTTCGGAGCCTACGTGATGCATTGGGTCCGGCAGGCACCTGGGAAAGGC |
| (VH-VL) | CTGGAGTGGGTGTCCTCCATTAGTGGCGGCAGCACTTACTACGCCGACTCCGTTAAAGGGAGATTC |
| | ACAATAAGCAGGGACAACTCAAAGAACACGCTGTACCTCCAGATGAATAGCCTTCGCGCAGAAGAT |
| | ACCGCCGTGTACTATTGCGCCAGGCACCCAGTCCGTGGCGTGATTGGGGCAGGCTGGTTCGATCCT |
| | TGGGGTCAGGGTACACTTGTAACAGTGTCCAGTGGAGGAGGTGGAAGTGGTGGCGGAGGTTCTGGA |
| | GGAGGAGGGTCCGACATACAGATGACTCAGTCTCCAAGCTCCTTGTCAGCTTCTGTTGGGGACCGA |
| | GTTACCATCACTTGTAGGGCCTCACAAAATATCTCCCGCTGGCTGGCTTGGTATCAGCAAAAGCCG |
| | GGCAAAGCTCCCAAGCTGCTGATCTACGCGGCGAGTAGCCTCCAGTCGGGAGTACCCAGCAGATTT |
| | AGCGGCTCCGGGTCTGGGACCGATTTCACCCTAACAATCAGTAGCCTCCAGCCCGAGGATTTTGCC |
| | ACTTATTATTGTCAACAGGCAATTAGCTTCCCTTTAACCTTTGGCGGTGGCACCAAGGTCGAAATC |
| | AAG (SEQ ID NO: 811) |
| TMPRSS4 | GAGGTTCAGCTTCTCGAGTCGGGCGGAGGGCTAGTTCAGCCTGGCGGGTCTTTGCGTCTGAGCTGT |
| Ab73 scFv | GCCGCCAGCGGCTTTACCTTCTCCTCATACGCCATGCATTGGGTTCGACAGGCTCCTGGGAAGGGC |
| (VH-VL) | CTGGAGTGGCTCGCCGTAATCTCCTTCGACGGGTCTATCAGACACTATGCGGACTCCGTGAAAGGC |
| | AGGTTCACCATTTCTCGGGACAATTCCAAGAACACGCTGTACTTGCAGATGAACAGTCTGCGGGCA |
| | GAAGATACCGCCGTGTACTATTGCGCCAAACCAAAGGCCTCCAGCGGGCCGCGCTTGATAGATTAC |
| | TGGGGACAAGGGACTCTTGTGACCGTCAGCTCAGGTGGAGGAGGAAGTGGCGGTGGTGGGTCTGGT |
| | GGTGGCGGGAGCGACATTCAGATGACACAGAGTCCATCTTCACTGTCAGCTTCGGTCGGCGACAGA |
| | GTGACTATTACATGTCGAGCATCCCAAGGAATCTCCAATTCTCTGGCGTGGTATCAACAGAAACCC |
| | GGCAAAGCTCCCAAGCTGCTGATATACAGCGCAGTGAACCTCCAGAGCGGAGTGCCCTCACGCTTT |
| | TCCGGAAGTGGCTCTGGGACTGATTTTACACTTACGATAAGTAGCCTCCAGCCTGAAGATTTCGCT |
| | ACATATTACTGCCAACAGGCAAATAGCTTTCCATTAACTTTCGGCGGCGGAACAAAAGTCGAAATC |
| | AAG (SEQ ID NO: 812) |
| TMPRSS4 | GAAGTGCAGCTGCTCGAAAGTGGAGGCGGGCTGGTTCAACCCGGAGGGAGCTTGCGGCTCTCATGC |
| Ab74 scFv | GCTGCGAGCGGTTTTACCTTCTCCTCCTATGCCATGCATTGGGTTCGGCAGGCGCCCGGGAAAGGC |
| (VH-VL) | CTGGAGTGGGTGTCCTCCATCTCAAGTAGCTCTACCTACATTCACTACGCCGATAGCGTCAAGGGT |
| | AGATTCACGATCTCCCGCGACAACAGCAAAAATACCCTGTACCTCCAGATGAACTCCTTACGAGCC |
| | GAGGACACTGCTGTGTACTATTGTGCAAGGGTGGGGAGGTATTACGGCAGCGGCTCATCACTGGTA |
| | GACTATTGGGGACAAGGGACACTTGTCACCGTGTCTAGCGGCGGCGGTGGATCAGGTGGCGGAGGA |
| | AGTGGAGGTGGAGGGTCTGACATTCAGATGACTCAGTCGCCATCATCGTTGTCCGCTAGTGTCGGC |
| | GATAGAGTGACTATTACCTGCCGTGCCTCTCAGAGCGTGTCCTCCTGGCTGGCATGGTATCAACAG |
| | AAACCTGGGAAGGCACCGAAGCTGCTCATCTACGATGCCTCTAGTCTACAGTCTGGCGTACCCTCC |
| | CGCTTTAGCGGCTCTGGGTCTGGCACCGATTTCACTCTTACAATAAGCAGTTTACAGCCTGAGGAC |
| | TTCGCCACATATTACTGTCAACAGGCTAAAAGTTTTCCACCTACGTTTGGCCAAGGGACAAAGGTC |
| | GAAATCAAG (SEQ ID NO: 813) |
| TMPRSS4 | GAAGTGCAGTTACTCGAGAGCGGCGGCGGATTGGTCCAGCCTGGCGGTAGCCTGCGGTTGTCATGC |
| Ab75 scFv | GCTGCGAGTGGGTTCACCTTCTCCTCATACGCCATGTCGTGGGTCCGGCAGGCACCCGGCAAAGGC |
| (VH-VL) | CTGGAGTGGGTGTCCTCCATCAGTAGTGCTTCTAGCTACAAGTATTATGCCGACTCCGTGAAAGGG |
| | CGATTTACCATCTCCCGAGACAATTCCAAGAATACGCTGTACCTCCAGATGAACTCTCTTCGCGCT |
| | GAAGATACCGCCGTGTACTATTGTGCAAGGGATATATACTCCAGCGGATGGCGCGGCTACTACTAC |
| | TATGGGATGGATGTTTGGGGACAAGGGACCACGGTGACAGTGTCAAGTGGAGGCGGCGGTTCTGGA |
| | GGAGGCGGATCTGGAGGCGGCGGTTCAGACATTCAGATGACCCAGTCTCCATCTTCACTGTCAGCT |
| | AGTGTTGGGGATAGAGTCACTATAACTTGCAGGGCCTCTCAAGGGATTAGGAACGACCTTAACTGG |
| | TATCAGCAAAAGCCCGGGAAAGCACCGAAGCTCCTGATTTACGCAGCGACAAGACTGCAAAGCGGC |
| | GTACCTAGCAGATTCAGCGGGTCGGGTTCCGGGACTGATTTTACCCTCACAATCAGCTCCCTACAG |
| | CCAGAGGACTTCGCCACTTATTACTGTCAACAGGCCCATAGTTTTCCCTATAGCTTTGGGCAGGGA |
| | ACACGTCTGGAAATCAAG (SEQ ID NO: 814) |
| TMPRSS4 | GAAGTCCAACTCCTGGAGAGTGGCGGCGGGCTGGTACAGCCCGGCGGATCTTTGCGGCTGAGTTGT |
| Ab76 scFv | GCTGCAAGCGGGTTTACCTTCTCCTCATATGCCATGTCATGGGTTCGGCAGGCACCTGGGAAGGGC |
| (VH-VL) | CTAGAGTGGGTCTCAGCCATTAGCGGGTCGGGTGGCAATGCGTACTATGCGGACAGCGTGAAGGGC |
| | CGTTTCACCATCAGCCGCGACAATGCCAAAAACAGTCTCTACTTGCAGATGAACTCCCTGAGGGCT |
| | GAGGACACTGCGGTGTACTATTGCGCCAAAAATAGTTGGGGCTCTTATAGGCCAAGAGCCTTTGAT |
| | ATTTGGGGACAAGGGACAATGGTGACTGTGTCCTCCGGCGGAGGTGGATCAGGTGGCGGAGGAAGC |
| | GGAGGTGGAGGGAGTGACATTGTGATGACACAAAGCCCAGATTCTCTTGCTGTCAGCCTCGGAGAG |
| | AGAGCCACGATCAATTGCAAATCCTCCCAGTCTGTGCTGTACTCATCTAACAACAAGAACTATCTC |
| | GCATGGTACCAGCAGAAACCGGGCCAGCCTCCCAAACTGCTGATCTACTGGGCCTCTACCCGAGCA |
| | TCGGGCGTGCCTGACCGCTTTAGCGGGTCTGGGTCTGGGACCGATTTCACTCTTACAATAAGTTCC |
| | TTACAAGCAGAAGATGTCGCCGTTTATTACTGCCAGCAGTATCTGAGCTTACCCTACACCTTCGGC |
| | CAGGGTACAAAAGTTGAAATCAAG (SEQ ID NO: 815) |
| TMPRSS4 | CAGGTTCAGCTTGTCCAGTCTGGTGCCGAGGTGAAAAAGCCTGGCGCGTCAGTTAAAGTGTCCTGC |
| Ab77 scFv | AAGGCCAGCGGGAATATCTTCACCGCACAGTACATGCATTGGGTTCGGCAGGCACCAGGCCAGGGT |
| (VH-VL) | TTGGAATGGATGGGCTGGATGAATCCGAATACCGTCTATACCGGGAGTGCCCAAAAGTTCCAGGGC |
| | CGAGTCACTATGACAAGAGACACCAGCACATCCACTGTCTACATGGAGCTAAGCTCTCTGCGCTCA |
| | GAAGATACCGCTGTGTACTATTGCGCCAGGGATTGGGTCGGTGATGGGTATAATAGCTTTGATTAT |
| | TGGGGACAAGGCACATTAGTAACTGTGTCCAGTGGCGGAGGCGGCTCCGGAGGAGGAGGTAGTGGA |
| | GGAGGAGGGTCAGACATTGTTATGACCCAGTCACCAGATTCGCTGGCAGTGTCCCTGGGCGAAAGG |
| | GCTACTATTAACTGTAAAAGTAGCCAGTCCGTGCTCTATAGCAGTAACAACAAAAACTACTTGGCC |
| | TGGTACCAACAGAAGCCCGGGCAGCCTCCCAAACTGCTGATCTACTGGGCCTCTACAAGAGAGTCT |
| | GGGGTGCCCGACCGTTTTTCTGGCTCTGGGTCCGGCACTGACTTCACGCTTACGATAAGCAGCCTC |
| | CAGGCTGAGGACGTAGCTGTGTACTATTGTCAACAGTACTATACCACACCTTTCACGTTTGGCCCA |
| | GGGACAAAGGTGGACATCAAG (SEQ ID NO: 816) |
| TMPRSS4 | GAAGTTCAGCTGCTCGAAAGCGGAGGCGGGCTGGTCCAGCCTGGCGGGAGTTTACGGTTGTCCTGT |
| Ab78 scFv | GCCGCGTCTGGTTTTACCTTCTCCTCATACGGCATGAATTGGGTGCGCCAGGCACCCGGGAAAGGC |
| (VH-VL) | CTGGAGTGGGTCAGCGCTATTAGTGGTTCTGGTGGCAGGACTTACTACGCTGATTCAGTTAAAGGG |
| | AGATTCACCATTTCACGAGACAACGCTAAAAACAGCCTGTACTTGCAGATGAACTCCCTTAGGGCC |
| | GAGGACACCGCAGTGTATTACTGCGCTAAGGGCACATATTATTCCTCGCCAAAGTATTCGTTTGAC |
| | TATTGGGGACAAGGCACTCTCGTAACCGTGTCCTCCGGCGGAGGAGGTTCCGGAGGAGGTGGATCA |
| | GGCGGTGGAGGGAGTGACATCCAGATGACGCAGAGTCCTAGCTCCCTGTCAGCCTCTGTCGGCGAT |
| | AGAGTGACAATTACTTGCCGGGCGAGTCAAGATATCAAGAATTTCCTCGCATGGTATCAGCAAAAG |
| | CCCGGGAAAGCACCGAAACTGCTGATCTACGCCGCCAGCAGCCTCCAGAGCGGCGTGCCATCTCGT |
| | TTTTCAGGCTCTGGGTCTGGGACAGATTTCACACTTACCATAAGTAGCTTACAGCCCGAGGACTTT |
| | GCCACCTATTACTGTCAACAGTCTTACAGCACTCCTTGGACGTTCGGGCAGGGAACAAAGCTAGAA |
| | ATCAAG (SEQ ID NO: 817) |
| TMPRSS4 | GAAGTTCAGCTTCTCGAGAGCGGCGGCGGGCTGGTGCAACCGGGAGGTTCTTTGCGGCTGTCATGT |
| Ab79 scFv | GCCGCGAGCGGGCTGACCTTCAGCTCATATCAGATGTCATCCGTCAGTCAGGCACCTGGCAAAGGC |
| (VH-VL) | CTGGAGTGGGTGTCCTACATAAGCAGTGCAGCCAATACTGTGTACTATGCGGACAGCGTTAAGGGC |
| | CGATTCACGATCAGTCGGGACAACTCCAAGAACACTCTGTACCTCCAGATGAACTCCTTACGCGCA |
| | GAGGATACTGCTGTGTACTATTGCGCCAGGGAAGATGAGTCTAGATCGCCTTATTGTAGCGGCGGG |
| | TCTTGCTACCGTGCTGAATACTTTCAACATTGGGGTCAGGGTACACTTGTAACCGTGTCCTCCGGA |
| | GGCGGAGGGAGTGGAGGCGGTGGTTCTGGAGGAGGAGGCTCTGACATTCAGATGACACAGAGCCCA |
| | AGCTCACTGTCAGCTTCTGTAGGCGACCGCGTCACCATCACTTGCAGAGCCTCGCAGGGAATTTCT |
| | AATTACCTAGCATGGTATCAACAGAAGCCAGGGAAAGCTCCTAAGCTGCTGATCTACGCAGCAAGT |
| | AGTCTCCAGAGTGGAGTGCCGTCCAGGTTTAGCGGCAGCGGTTCAGGGACGGACTTCACCCTCACC |
| | ATAAGTTCCTTACAGCCCGAGGATTTCGCCACCTATTATTGTCAACAGAGCTACTCTACACCCTTG |
| | ACATTTGGGCCAGGGACAAAAGTCGATATTAAG (SEQ ID NO: 818) |

[0564] In some embodiments, the antibody or antigen-binding fragment that binds to TMPRSS4 comprises an scFv encoded by a nucleic acid sequence at least 80%, at least 85%, at least 90%, at least 91%, at least 92%, at least 93%, at least 94%, at least 95%, at least 96%, at least 97%, at least 98%, at least 99%, at least 99.5% or 100% identical to the nucleic acid sequence set forth in SEQ ID NO: 740, and optionally comprises nucleic acid sequences encoding VH CDRs and VL CDRs that are 100% identical to those therein. In some embodiments, the antibody or antigen-binding fragment that binds to TMPRSS4 comprises an scFv encoded by the nucleic acid sequence set forth in any one of SEQ ID NOs: 740-818, and optionally comprises VH CDRs and VL CDRs that are 100% identical to those therein.

### SLC34A2 Antigen Binding Domains

[0565] In some aspects, provided herein are antigen binding domains (e.g., antibodies or antigen binding fragments thereof) that bind to SLC34A2. In some aspects, provided herein are means for binding to SLC34A2. In some embodiments, the means for binding to SLC34A2 comprises an antibody or antigen-binding fragment provided herein. In some embodiments, a SLC34A2 antibody or antigen-binding fragment or equivalent thereof comprises means for binding a SLC34A2 protein, optionally binding a human SLC34A2 protein in the region(s) of human SLC34A2 bound by the SLC34A2 antigen binding domains (e.g., an antibody or antigen binding fragment thereof as described in the Examples below). In some embodiments, the means binds a SLC34A2 protein. In some embodiments, the means binds a human SLC34A2 protein (e.g., the SLC34A2 protein of SEQ ID NO: 962) and related isoforms and orthologs. In some embodiments, the means is a SLC34A2 antibody or antigen-binding fragment or equivalent thereof (e.g., a full length antibody or a F(ab′)₂ fragment, a Fab fragment, a single chain variable fragment (scFv), and a single domain antibody (sdAb), or a functional fragment thereof) means for binding a SLC34A2 protein. In some embodiments, the means for binding SLC34A2 includes the anti-SLC34A2 antibodies and antigen-binding fragments or equivalents thereof described herein.

[0566] Solute Carrier Family 34 Member 2 (SLC34A2 HGNC: 11020, NCBI Entrez Gene: 10568; UniProtKB/Swiss-Prot: 095436), otherwise known as NaPi2b, NPT2B, NPTIIb, and Sodium-Phosphate Transport Protein 2B, is a pH-sensitive sodium-dependent phosphate transporter involved in actively transporting phosphate into cells via Na(+) cotransport. Phosphate uptake via SLC34A2 is increased at a lower pH.

[0567] The amino acid and nucleic acid sequences of human SLC34A2 are provided below in Table 8.

TABLE 8
SLC34A2 sequences

| | |
|---|---|
| Human | MAPWPELGDAQPNPDKYLEGAAGQQPTAPDKSKETNKTDNTEAPVTKIELLPSYSTATLIDEPTEV |
| SLC34A2 | DDPWNLPTLQDSGIKWSERDTKGKILCFFQGIGRLILLLGFLYFFVCSLDILSSAFQLVGGKMAGQ |
| SEQ ID | FFSNSSIMSNPLLGLVIGVLVTVLVQSSSTSTSIVVSMVSSSLLTVRAAIPIIMGANIGTSITNTI |
| NO: 962 | VALMQVGDRSEFRRAFAGATVHDFFNWLSVLVLLPVEVATHYLEIITQLIVESFHFKNGEDAPDLL |
| | KVITKPFTKLIVQLDKKVISQIAMNDEKAKNKSLVKIWCKTFTNKTQINVTVPSTANCTSPSLCWT |
| | DGIQNWTMKNVTYKENIAKCQHIFVNFHLPDLAVGTILLILSLLVLCGCLIMIVKILGSVLKGQVA |
| | TVIKKTINTDFPFPFAWLTGYLAILVGAGMTFIVQSSSVFTSALTPLIGIGVITIERAYPLTLGSN |
| | IGTTTTAILAALASPGNALRSSLQIALCHFFFNISGILLWYPIPFTRLPIRMAKGLGNISAKYRWF |
| | AVFYLIIFFFLIPLTVFGLSLAGWRVLVGVGVPVVFIIILVLCLRLLQSRCPRVLPKKLQNWNFLP |
| | LWMRSLKPWDAVVSKFTGCFQMRCCCCCRVCCRACCLLCDCPKCCRCSKCCEDLEEAQEGQDVPVK |
| | APETFDNITISREAQGEVPASDSKTECTAL |
| Human | ATGGCTCCCTGGCCTGAATTGGGAGATGCCCAGCCCAACCCCGATAAGTACCTCGAAGGGGCCGCA |
| SLC34A2 | GGTCAGCAGCCCACTGCCCCTGATAAAAGCAAAGAGACCAACAAAACAGATAACACTGAGGCACCT |
| SEQ ID | GTAACCAAGATTGAACTTCTGCCGTCCTACTCCACGGCTACACTGATAGATGAGCCCACTGAGGTG |
| NO: 963 | GATGACCCCTGGAACCTACCCACTCTTCAGGACTCGGGGATCAAGTGGTCAGAGAGAGACACCAAA |
| | GGGAAGATTCTCTGTTTCTTCCAAGGGATTGGGAGATTGATTTTACTTCTCGGATTTCTCTACTTT |
| | TTCGTGTGCTCCCTGGATATTCTTAGTAGCGCCTTCCAGCTGGTTGGAGGAAAAATGGCAGGACAG |
| | TTCTTCAGCAACAGCTCTATTATGTCCAACCCTTTGTTGGGGCTGGTGATCGGGGTGCTGGTGACC |
| | GTCTTGGTGCAGAGCTCCAGCACCTCAACGTCCATCGTTGTCAGCATGGTGTCCTCTTCATTGCTC |
| | ACTGTTCGGGCTGCCATCCCCATTATCATGGGGGCCAACATTGGAACGTCAATCACCAACACTATT |
| | GTTGCGCTCATGCAGGTGGGAGATCGGAGTGAGTTCAGAAGAGCTTTTGCAGGAGCCACTGTCCAT |
| | GACTTCTTCAACTGGCTGTCCGTGTTGGTGCTCTTGCCCGTGGAGGTGGCCACCCATTACCTCGAG |
| | ATCATAACCCAGCTTATAGTGGAGAGCTTCCACTTCAAGAATGGAGAAGATGCCCCAGATCTTCTG |
| | AAAGTCATCACTAAGCCCTTCACAAAGCTCATTGTCCAGCTGGATAAAAAAGTTATCAGCCAAATT |
| | GCAATGAACGATGAAAAAGCGAAAAACAAGAGTCTTGTCAAGATTTGGTGCAAAACTTTTACCAAC |
| | AAGACCCAGATTAACGTCACTGTTCCCTCGACTGCTAACTGCACCTCCCCTTCCCTCTGTTGGACG |
| | GATGGCATCCAAAACTGGACCATGAAGAATGTGACCTACAAGGAGAACATCGCCAAATGCCAGCAT |
| | ATCTTTGTGAATTTCCACCTCCCGGATCTTGCTGTGGGCACCATCTTGCTCATACTCTCCCTGCTG |
| | GTCCTCTGTGGTTGCCTGATCATGATTGTCAAGATCCTGGGCTCTGTGCTCAAGGGGCAGGTCGCC |
| | ACTGTCATCAAGAAGACCATCAACACTGATTTCCCCTTTCCCTTTGCATGGTTGACTGGCTACCTG |
| | GCCATCCTCGTCGGGGCAGGCATGACCTTCATCGTACAGAGCAGCTCTGTGTTCACGTCGGCCTTG |
| | ACCCCCCTGATTGGAATCGGCGTGATAACCATTGAGAGGGCTTATCCACTCACGCTGGGCTCCAAC |
| | ATCGGCACCACCACCACCGCCATCCTGGCCGCCTTAGCCAGCCCTGGCAATGCATTGAGGAGTTCA |
| | CTCCAGATCGCCCTGTGCCACTTTTTCTTCAACATCTCCGGCATCTTGCTGTGGTACCCGATCCCG |
| | TTCACTCGCCTGCCCATCCGCATGGCCAAGGGGCTGGGCAACATCTCTGCCAAGTATCGCTGGTTC |
| | GCCGTCTTCTACCTGATCATCTTCTTCTTCCTGATCCCGCTGACGGTGTTTGGCCTCTCGCTGGCC |
| | GGCTGGCGGGTGCTGGTTGGTGTCGGGGTTCCCGTCGTCTTCATCATCATCCTGGTACTGTGCCTC |
| | CGACTCCTGCAGTCTCGCTGCCCACGCGTCCTGCCGAAGAAACTCCAGAACTGGAACTTCCTGCCG |
| | CTGTGGATGCGCTCGCTGAAGCCCTGGGATGCCGTCGTCTCCAAGTTCACCGGCTGCTTCCAGATG |
| | CGCTGCTGCTGCTGCTGCCGCGTGTGCTGCCGCGCGTGCTGCTTGCTGTGTGACTGCCCCAAGTGC |
| | TGCCGCTGCAGCAAGTGCTGCGAGGACTTGGAGGAGGCGCAGGAGGGGCAGGATGTCCCTGTCAAG |
| | GCTCCTGAGACCTTTGATAACATAACCATTAGCAGAGAGGCTCAGGGTGAGGTCCCTGCCTCGGAC |
| | TCAAAGACCGAATGCACGGCCTTG |

[0568] In some embodiments, the SLC34A2 antigen-binding moiety (e.g., an antigen binding protein or domain such as an antibody of antigen binding fragment thereof) is selected from the group consisting of an antibody, a nanobody, a diabody, a triabody, or a minibody, a F(ab′)₂ fragment, a Fab fragment, a single chain variable fragment (scFv), and a single domain antibody (sdAb), or a functional fragment thereof. In some embodiments, the antigen-binding moiety comprises an scFv. The antigen-binding moiety can include naturally-occurring amino acid sequences or can be engineered, designed, or modified so as to provide desired and/or improved properties, e.g., increased binding affinity.

[0569] In some embodiments, provided SLC34A2 antigen-binding moieties, including antigen-binding fragments thereof, include any combination of the heavy chain and light chain complementarity-determining regions (CDRs) described herein. In some embodiments, the anti-SLC34A2 antibody or antigen-binding fragment thereof comprises any one of the CDR-H1 as described herein, any one of the CDR-H2 as described herein, any one of the CDR-H3 as described herein, any one of the CDR-L1 as described herein, any one of the CDR-L2 as described herein and any one of the CDR-L3 as described herein. In some of any such embodiments, any one or more of the CDR-H1, the CDR-H2 and the CDR-H3 sequences described herein, and any one or more of the CDR-L1, the CDR-L2 and the CDR-L3 sequences described herein can be used in combination.

[0570] Also among the antibodies are those having sequences at least at or about 90%, at or about 91%, at or about 92%, at or about 93%, at or about 94%, at or about 95%, at or about 96%, at or about 97%, at or about 98%, or at or about 99% identical to any such CDR sequence, e.g., any of the CDR-H1, CDR-H2, CDR-H3, CDR-L1, CDR-L2, CDR-L3. In some embodiments, among the antibodies are those in which a CDR contained therein has no more than 2 amino acid difference compared to any such above CDR sequence, e.g., any of the CDR-H1, CDR-H2, CDR-H3, CDR-L1, CDR-L2, CDR-L3. In some embodiments, among the antibodies are those in which a CDR contained therein has no more than 1 amino acid difference compared to any such above CDR sequence, e.g., any of the CDR-H1, CDR-H2, CDR-H3, CDR-L1, CDR-L2, CDR-L3.

[0571] In some embodiments, a provided anti-SLC34A2 antibody or an antigen-binding fragment thereof has a CDR-H1, a CDR-H2 and a CDR-H3 present in a VH region amino acid sequence set forth in any one of SEQ ID NOs: 1001, 1009, 1015, 1023, 1031, 1039, 1047, 1053, 1059, 1066, 1073, 1078, 1084, 1090, 1094, 1100, or an amino acid sequence that has at least at or about 85%, 86%, 87%, 88%, 89%, 90%, 91%, 92%, 93%, 94%, 95%, 96%, 97%, 98%, or 99% sequence identity to the VH region amino acid sequence set forth in any one of SEQ ID NOs: 1001, 1009, 1015, 1023, 1031, 1039, 1047, 1053, 1059, 1066, 1073, 1078, 1084, 1090, 1094, 1100, and a CDR-L1, a CDR-L2 and a CDR-L3 present in a VL region amino acid sequence set forth in any one of SEQ ID NOs: 1005, 1013, 1019, 1027, 1035, 1043, 1051, 1056, 1063, 1070, 1076, 1082, 1088, 1093, 1097, 1103, 1125, 1154, 1155, 1156, 1178, 1233, or 1234, or an amino acid sequence that has at least at or about 85%, 86%, 87%, 88%, 89%, 90%, 91%, 92%, 93%, 94%, 95%, 96%, 97%, 98%, or 99% sequence identity to the VL region amino acid sequence set forth in any one of SEQ ID NOs: 1005, 1013, 1019, 1027, 1035, 1043, 1051, 1056, 1063, 1070, 1076, 1082, 1088, 1093, 1097, 1103, 1154, 1125, 1155, 1156, 1178, 1233, or 1234.

[0572] In some embodiments, a provided anti-SLC34A2 antibody or an antigen-binding fragment thereof has a CDR-H1, a CDR-H2 and a CDR-H3 present in a VH region amino acid sequence set forth in any one of SEQ ID NOs: 1001, 1009, 1015, 1023, 1031, 1039, 1047, 1053, 1059, 1066, 1073, 1078, 1084, 1090, 1094, 1100, and a CDR-L1, a CDR-L2 and a CDR-L3 present in a VL region amino acid sequence set forth in any one of SEQ ID NOs: 1005, 1013, 1019, 1027, 1035, 1043, 1051, 1056, 1063, 1070, 1076, 1082, 1088, 1093, 1097, 1103, 1125, 1154, 1155, 1156, 1178, 1233, or 1234. In some embodiments, the combination of six CDRs (a CDR-H1, a CDR-H2, a CDR-H3, a CDR-L1, a CDR-L2 and a CDR-L3) is according to Kabat, Chothia, AbM, IMGT, or Contact numbering.

[0573] Exemplary heavy and light chain CDR sequences of the anti-SLC34A2 antibodies or antigen-binding fragments thereof are provided in Table 9 provided herein.

[0574] In some of any of the provided embodiments, the VH region contains a CDR-H1 set forth in SEQ ID NO: 1002, a CDR-H2 set forth in SEQ ID NO: 1003, and a CDR-H3 set forth in SEQ ID NO: 1004; and the VL region contains a CDR-L1 set forth in SEQ ID NO: 1006, a CDR-L2 set forth in SEQ ID NO: 1007, and a CDR-L3 set forth in SEQ ID NO: 1008. In some of any of the provided embodiments, the VH region contains a CDR-H1 set forth in SEQ ID NO: 1010, a CDR-H2 set forth in SEQ ID NO: 1011, and a CDR-H3 set forth in SEQ ID NO: 1012; and the VL region contains a CDR-L1 set forth in SEQ ID NO: 1006, a CDR-L2 set forth in SEQ ID NO: 1007, and a CDR-L3 set forth in SEQ ID NO: 1014. In some of any of the provided embodiments, the VH region contains a CDR-H1 set forth in SEQ ID NO: 1016, a CDR-H2 set forth in SEQ ID NO: 1017, and a CDR-H3 set forth in SEQ ID NO: 1018; and the V_{L} region contains a CDR-L1 set forth in SEQ ID NO: 1020, a CDR-L2 set forth in SEQ ID NO: 1021, and a CDR-L3 set forth in SEQ ID NO: 1022. In some of any of the provided embodiments, the V_{H} region contains a CDR-H1 set forth in SEQ ID NO: 1024, a CDR-H2 set forth in SEQ ID NO: 1025, and a CDR-H3 set forth in SEQ ID NO: 1026; and the V_{L} region contains a CDR-L1 set forth in SEQ ID NO: 1028, a CDR-L2 set forth in SEQ ID NO: 1029, and a CDR-L3 set forth in SEQ ID NO: 1030. In some of any of the provided embodiments, the V_{H} region contains a CDR-H1 set forth in SEQ ID NO: 1032, a CDR-H2 set forth in SEQ ID NO: 10 33, and a CDR-H3 set forth in SEQ ID NO: 1034; and the V_{L} region contains a CDR-L1 set forth in SEQ ID NO: 1036, a CDR-L2 set forth in SEQ ID NO: 1037, and a CDR-L3 set forth in SEQ ID NO: 1038. In some of any of the provided embodiments, the V_{H} region contains a CDR-H1 set forth in SEQ ID NO: 1040, a CDR-H2 set forth in SEQ ID NO: 1041, and a CDR-H3 set forth in SEQ ID NO: 1042; and the V_{L} region contains a CDR-L1 set forth in SEQ ID NO: 1044, a CDR-L2 set forth in SEQ ID NO: 1045, and a CDR-L3 set forth in SEQ ID NO: 1046. In some of any of the provided embodiments, the V_{H} region contains a CDR-H1 set forth in SEQ ID NO: 1048, a CDR-H2 set forth in SEQ ID NO: 1049, and a CDR-H3 set forth in SEQ ID NO: 1050; and the V_{L} region contains a CDR-L1 set forth in SEQ ID NO: 1036, a CDR-L2 set forth in SEQ ID NO: 1021, and a CDR-L3 set forth in SEQ ID NO: 1052. In some of any of the provided embodiments, the V_{H} region contains a CDR-H1 set forth in SEQ ID NO: 1048, a CDR-H2 set forth in SEQ ID NO: 1054, and a CDR-H3 set forth in SEQ ID NO: 1055; and the V_{L} region contains a CDR-L1 set forth in SEQ ID NO: 1036, a CDR-L2 set forth in SEQ ID NO: 1057, and a CDR-L3 set forth in SEQ ID NO: 1058. In some of any of the provided embodiments, the V_{H} region contains a CDR-H1 set forth in SEQ ID NO: 1060, a CDR-H2 set forth in SEQ ID NO: 1061, and a CDR-H3 set forth in SEQ ID NO: 1062; and the V_{L} region contains a CDR-L1 set forth in SEQ ID NO: 1064, a CDR-L2 set forth in SEQ ID NO: 1021, and a CDR-L3 set forth in SEQ ID NO: 1065. In some of any of the provided embodiments, the V_{H} region contains a CDR-H1 set forth in SEQ ID NO: 1067, a CDR-H2 set forth in SEQ ID NO: 1068, and a CDR-H3 set forth in SEQ ID NO: 1069; and the V_{L} region contains a CDR-L1 set forth in SEQ ID NO: 1064, a CDR-L2 set forth in SEQ ID NO: 1021, and a CDR-L3 set forth in SEQ ID NO: 1065. In some of any of the provided embodiments, the V_{H} region contains a CDR-H1 set forth in SEQ ID NO: 1067, a CDR-H2 set forth in SEQ ID NO: 1068, and a CDR-H3 set forth in SEQ ID NO: 1069; and the V_{L} region contains a CDR-L1 set forth in SEQ ID NO: 1028, a CDR-L2 set forth in SEQ ID NO: 1071, and a CDR-L3 set forth in SEQ ID NO: 1072. In some of any of the provided embodiments, the V_{H} region contains a CDR-H1 set forth in SEQ ID NO: 1032, a CDR-H2 set forth in SEQ ID NO: 1074, and a CDR-H3 set forth in SEQ ID NO: 1075; and the V_{L} region contains a CDR-L1 set forth in SEQ ID NO: 1036, a CDR-L2 set forth in SEQ ID NO: 1021, and a CDR-L3 set forth in SEQ ID NO: 1077. In some of any of the provided embodiments, the V_{H} region contains a CDR-H1 set forth in SEQ ID NO: 1079, a CDR-H2 set forth in SEQ ID NO: 1080, and a CDR-H3 set forth in SEQ ID NO: 1081; and the V_{L} region contains a CDR-L1 set forth in SEQ ID NO: 1036, a CDR-L2 set forth in SEQ ID NO: 1021, and a CDR-L3 set forth in SEQ ID NO: 1083. In some of any of the provided embodiments, the V_{H} region contains a CDR-H1 set forth in SEQ ID NO: 1085, a CDR-H2 set forth in SEQ ID NO: 1086, and a CDR-H3 set forth in SEQ ID NO: 1087; and the V_{L} region contains a CDR-L1 set forth in SEQ ID NO: 1089, a CDR-L2 set forth in SEQ ID NO: 1021, and a CDR-L3 set forth in SEQ ID NO: 1065. In some of any of the provided embodiments, the V_{H} region contains a CDR-H1 set forth in SEQ ID NO: 1010, a CDR-H2 set forth in SEQ ID NO: 1091, and a CDR-H3 set forth in SEQ ID NO: 1092; and the V_{L} region contains a CDR-L1 set forth in SEQ ID NO: 106, a CDR-L2 set forth in SEQ ID NO: 107, and a CDR-L3 set forth in SEQ ID NO: 108. In some of any of the provided embodiments, the V_{H} region contains a CDR-H1 set forth in SEQ ID NO: 1095, a CDR-H2 set forth in SEQ ID NO: 103, and a CDR-H3 set forth in SEQ ID NO: 1096; and the V_{L} region contains a CDR-L1 set forth in SEQ ID NO: 1036, a CDR-L2 set forth in SEQ ID NO: 1098, and a CDR-L3 set forth in SEQ ID NO: 1099. In some of any of the provided embodiments, the V_{H} region contains a CDR-H1 set forth in SEQ ID NO: 1101, a CDR-H2 set forth in SEQ ID NO: 1102, and a CDR-H3 set forth in SEQ ID NO: 1096; and the V_{L} region contains a CDR-L1 set forth in SEQ ID NO: 1036, a CDR-L2 set forth in SEQ ID NO: 1104, and a CDR-L3 set forth in SEQ ID NO: 1105. In some of any of the provided embodiments, the V_{H} region contains a CDR-H1 set forth in SEQ ID NO: 1048, a CDR-H2 set forth in SEQ ID NO: 1049, and a CDR-H3 set forth in SEQ ID NO: 1050; and the V_{L} region contains a CDR-L1 set forth in SEQ ID NO: 1036, a CDR-L2 set forth in SEQ ID NO: 15, and a CDR-L3 set forth in SEQ ID NO: 1052. In some of any of the provided embodiments, the V_{H} region contains a CDR-H1 set forth in SEQ ID NO: 1032, a CDR-H2 set forth in SEQ ID NO: 1074, and a CDR-H3 set forth in SEQ ID NO: 1075; and the V_{L} region contains a CDR-L1 set forth in SEQ ID NO: 1251, a CDR-L2 set forth in SEQ ID NO: 15, and a CDR-L3 set forth in SEQ ID NO: 1077.

[0575] In some embodiments, any of the provided anti-SLC34A2 antibodies or antigen binding fragments has a V_{H} region having the amino acid sequence set forth in any one of SEQ ID NOS: 1001, 1009, 1015, 1023, 1031, 1039, 1047, 1053, 1059, 1066, 1073, 1078, 1084, 1090, 1094, 1100, or an amino acid sequence that has at least at or about 85%, 86%, 87%, 88%, 89%, 90%, 91%, 92%, 93%, 94%, 95%, 96%, 97%, 98%, or 99% sequence identity to the V_{H} region amino acid sequence set forth in any one of SEQ ID NOs: 1001, 1009, 1015, 1023, 1031, 1039, 1047, 1053, 1059, 1066, 1073, 1078, 1084, 1090, 1094, 1100, and has a V_{L} region having the amino acid sequence set forth in any one of SEQ ID NOs: 1005, 1013, 1019, 1027, 1035, 1043, 1051, 1056, 1063, 1070, 1076, 1082, 1088, 1093, 1097, 1103, 1125, 1154, 1155, 1156, 1178, 1233, 1234, or 1251, or an amino acid sequence that has at least at or about 85%, 86%, 87%, 88%, 89%, 90%, 91%, 92%, 93%, 94%, 95%, 96%, 97%, 98%, or 99% sequence identity to the V_{L} region amino acid sequence set forth in any one of SEQ ID NOs: 1005, 1013, 1019, 1027, 1035, 1043, 1051, 1056, 1063, 1070, 1076, 1082, 1088, 1093, 1097, 1103, 1125, 1154, 1155, 1156, 1178, 1233, 1234, or 1251.

[0576] In some embodiments, the antibody or antigen-binding fragment provided herein, the V_{H} region is or comprises an amino acid sequence having at least at or about 85%, 86%, 87%, 88%, 89%, 90%, 91%, 92%, 93%, 94%, 95%, 96%, 97%, 98% or 99% identity to SEQ ID NO: 1001, and the V_{L} region is or comprises an amino acid sequence having at least at or about 85%, 86%, 87%, 88%, 89%, 90%, 91%, 92%, 93%, 94%, 95%, 96%, 97%, 98% or 99% identity to SEQ ID NO: 1005; the V_{H} region is or comprises an amino acid sequence having at least at or about 85%, 86%, 87%, 88%, 89%, 90%, 91%, 92%, 93%, 94%, 95%, 96%, 97%, 98% or 99% identity to SEQ ID NO: 1009, and the V_{L} region is or comprises an amino acid sequence having at least at or about 85%, 86%, 87%, 88%, 89%, 90%, 91%, 92%, 93%, 94%, 95%, 96%, 97%, 98% or 99% identity to SEQ ID NO: 1013; the V_{H} region is or comprises an amino acid sequence having at least at or about 85%, 86%, 87%, 88%, 89%, 90%, 91%, 92%, 93%, 94%, 95%, 96%, 97%, 98% or 99% identity to SEQ ID NO: 1015, and the V_{L} region is or comprises an amino acid sequence having at least at or about 85%, 86%, 87%, 88%, 89%, 90%, 91%, 92%, 93%, 94%, 95%, 96%, 97%, 98% or 99% identity to SEQ ID NO: 1019 or 1125; the V_{H} region is or comprises an amino acid sequence having at least at or about 85%, 86%, 87%, 88%, 89%, 90%, 91%, 92%, 93%, 94%, 95%, 96%, 97%, 98% or 99% identity to SEQ ID NO: 1023, and the V_{L} region is or comprises an amino acid sequence having at least at or about 85%, 86%, 87%, 88%, 89%, 90%, 91%, 92%, 93%, 94%, 95%, 96%, 97%, 98% or 99% identity to SEQ ID NO: 1027; the V_{H} region is or comprises an amino acid sequence having at least at or about 85%, 86%, 87%, 88%, 89%, 90%, 91%, 92%, 93%, 94%, 95%, 96%, 97%, 98% or 99% identity to SEQ ID NO: 1031, and the V_{L} region is or comprises an amino acid sequence having at least at or about 85%, 86%, 87%, 88%, 89%, 90%, 91%, 92%, 93%, 94%, 95%, 96%, 97%, 98% or 99% identity to SEQ ID NO: 1035; the V_{H} region is or comprises an amino acid sequence having at least at or about 85%, 86%, 87%, 88%, 89%, 90%, 91%, 92%, 93%, 94%, 95%, 96%, 97%, 98% or 99% identity to SEQ ID NO: 1039, and the V_{L} region is or comprises an amino acid sequence having at least at or about 85%, 86%, 87%, 88%, 89%, 90%, 91%, 92%, 93%, 94%, 95%, 96%, 97%, 98% or 99% identity to SEQ ID NO: 1043; the V_{H} region is or comprises an amino acid sequence having at least at or about 85%, 86%, 87%, 88%, 89%, 90%, 91%, 92%, 93%, 94%, 95%, 96%, 97%, 98% or 99% identity to SEQ ID NO: 1047, and the V_{L} region is or comprises an amino acid sequence having at least at or about 85%, 86%, 87%, 88%, 89%, 90%, 91%, 92%, 93%, 94%, 95%, 96%, 97%, 98% or 99% identity to SEQ ID NO: 1051; the V_{H} region is or comprises an amino acid sequence having at least at or about 85%, 86%, 87%, 88%, 89%, 90%, 91%, 92%, 93%, 94%, 95%, 96%, 97%, 98% or 99% identity to SEQ ID NO: 1053, and the V_{L} region is or comprises an amino acid sequence having at least at or about 85%, 86%, 87%, 88%, 89%, 90%, 91%, 92%, 93%, 94%, 95%, 96%, 97%, 98% or 99% identity to SEQ ID NO: 1056; the V_{H} region is or comprises an amino acid sequence having at least at or about 85%, 86%, 87%, 88%, 89%, 90%, 91%, 92%, 93%, 94%, 95%, 96%, 97%, 98% or 99% identity to SEQ ID NO: 1059, and the V_{L} region is or comprises an amino acid sequence having at least at or about 85%, 86%, 87%, 88%, 89%, 90%, 91%, 92%, 93%, 94%, 95%, 96%, 97%, 98% or 99% identity to SEQ ID NO: 1063; the V_{H} region is or comprises an amino acid sequence having at least at or about 85%, 86%, 87%, 88%, 89%, 90%, 91%, 92%, 93%, 94%, 95%, 96%, 97%, 98% or 99% identity to SEQ ID NO: 1066, and the V_{L} region is or comprises an amino acid sequence having at least at or about 85%, 86%, 87%, 88%, 89%, 90%, 91%, 92%, 93%, 94%, 95%, 96%, 97%, 98% or 99% identity to SEQ ID NO: 1070; the V_{H} region is or comprises an amino acid sequence having at least at or about 85%, 86%, 87%, 88%, 89%, 90%, 91%, 92%, 93%, 94%, 95%, 96%, 97%, 98% or 99% identity to SEQ ID NO: 1073, and the V_{L} region is or comprises an amino acid sequence having at least at or about 85%, 86%, 87%, 88%, 89%, 90%, 91%, 92%, 93%, 94%, 95%, 96%, 97%, 98% or 99% identity to SEQ ID NO: 1076; the V_{H} region is or comprises an amino acid sequence having at least at or about 85%, 86%, 87%, 88%, 89%, 90%, 91%, 92%, 93%, 94%, 95%, 96%, 97%, 98% or 99% identity to SEQ ID NO: 1078, and the V_{L} region is or comprises an amino acid sequence having at least at or about 85%, 86%, 87%, 88%, 89%, 90%, 91%, 92%, 93%, 94%, 95%, 96%, 97%, 98% or 99% identity to SEQ ID NO: 1082; the V_{H} region is or comprises an amino acid sequence having at least at or about 85%, 86%, 87%, 88%, 89%, 90%, 91%, 92%, 93%, 94%, 95%, 96%, 97%, 98% or 99% identity to SEQ ID NO: 1084, and the V_{L} region is or comprises an amino acid sequence having at least at or about 85%, 86%, 87%, 88%, 89%, 90%, 91%, 92%, 93%, 94%, 95%, 96%, 97%, 98% or 99% identity to SEQ ID NO: 1088; the V_{H} region is or comprises an amino acid sequence having at least at or about 85%, 86%, 87%, 88%, 89%, 90%, 91%, 92%, 93%, 94%, 95%, 96%, 97%, 98% or 99% identity to SEQ ID NO: 1090, and the V_{L} region is or comprises an amino acid sequence having at least at or about 85%, 86%, 87%, 88%, 89%, 90%, 91%, 92%, 93%, 94%, 95%, 96%, 97%, 98% or 99% identity to SEQ ID NO: 1093; the V_{H} region is or comprises an amino acid sequence having at least at or about 85%, 86%, 87%, 88%, 89%, 90%, 91%, 92%, 93%, 94%, 95%, 96%, 97%, 98% or 99% identity to SEQ ID NO: 10 94, and the V_{L} region is or comprises an amino acid sequence having at least at or about 85%, 86%, 87%, 88%, 89%, 90%, 91%, 92%, 93%, 94%, 95%, 96%, 97%, 98% or 99% identity to SEQ ID NO: 1097; the V_{H} region is or comprises an amino acid sequence having at least at or about 85%, 86%, 87%, 88%, 89%, 90%, 91%, 92%, 93%, 94%, 95%, 96%, 97%, 98% or 99% identity to SEQ ID NO: 1100, and the V_{L} region is or comprises an amino acid sequence having at least at or about 85%, 86%, 87%, 88%, 89%, 90%, 91%, 92%, 93%, 94%, 95%, 96%, 97%, 98% or 99% identity to SEQ ID NO: 1103; the V_{H} region is or comprises an amino acid sequence having at least at or about 85%, 86%, 87%, 88%, 89%, 90%, 91%, 92%, 93%, 94%, 95%, 96%, 97%, 98% or 99% identity to SEQ ID NO: 1031, and the V_{L} region is or comprises an amino acid sequence having at least at or about 85%, 86%, 87%, 88%, 89%, 90%, 91%, 92%, 93%, 94%, 95%, 96%, 97%, 98% or 99% identity to SEQ ID NO: 1154; the V_{H} region is or comprises an amino acid sequence having at least at or about 85%, 86%, 87%, 88%, 89%, 90%, 91%, 92%, 93%, 94%, 95%, 96%, 97%, 98% or 99% identity to SEQ ID NO: 1039, and the V_{L} region is or comprises an amino acid sequence having at least at or about 85%, 86%, 87%, 88%, 89%, 90%, 91%, 92%, 93%, 94%, 95%, 96%, 97%, 98% or 99% identity to SEQ ID NO: 1155; the V_{H} region is or comprises an amino acid sequence having at least at or about 85%, 86%, 87%, 88%, 89%, 90%, 91%, 92%, 93%, 94%, 95%, 96%, 97%, 98% or 99% identity to SEQ ID NO: 1059, and the V_{L} region is or comprises an amino acid sequence having at least at or about 85%, 86%, 87%, 88%, 89%, 90%, 91%, 92%, 93%, 94%, 95%, 96%, 97%, 98% or 99% identity to SEQ ID NO: 1156; the V_{H} region is or comprises an amino acid sequence having at least at or about 85%, 86%, 87%, 88%, 89%, 90%, 91%, 92%, 93%, 94%, 95%, 96%, 97%, 98% or 99% identity to SEQ ID NO: 1066, and the V_{L} region is or comprises an amino acid sequence having at least at or about 85%, 86%, 87%, 88%, 89%, 90%, 91%, 92%, 93%, 94%, 95%, 96%, 97%, 98% or 99% identity to SEQ ID NO: 1233; the V_{H} region is or comprises an amino acid sequence having at least at or about 85%, 86%, 87%, 88%, 89%, 90%, 91%, 92%, 93%, 94%, 95%, 96%, 97%, 98% or 99% identity to SEQ ID NO: 1094, and the V_{L} region is or comprises an amino acid sequence having at least at or about 85%, 86%, 87%, 88%, 89%, 90%, 91%, 92%, 93%, 94%, 95%, 96%, 97%, 98% or 99% identity to SEQ ID NO: 1234; the V_{H} region is or comprises an amino acid sequence having at least at or about 85%, 86%, 87%, 88%, 89%, 90%, 91%, 92%, 93%, 94%, 95%, 96%, 97%, 98% or 99% identity to SEQ ID NO: 1096, and the V_{L} region is or comprises an amino acid sequence having at least at or about 85%, 86%, 87%, 88%, 89%, 90%, 91%, 92%, 93%, 94%, 95%, 96%, 97%, 98% or 99% identity to SEQ ID NO: 1251.

[0577] In some embodiments, the V_{H} region of the antibody or antigen-binding fragment thereof comprises the amino acid sequence of any one of SEQ ID NOs: 1001, 1009, 1015, 1023, 1031, 1039, 1047, 1053, 1059, 1066, 1073, 1078, 1084, 1090, 1094, 1100, and the V_{L} region of the antibody or antigen-binding fragment comprises the amino acid sequence of any one of SEQ ID NOs: 1005, 1013, 1019, 1027, 1035, 1043, 1051, 1056, 1063, 1070, 1076, 1082, 1088, 1093, 1097, 1125, 1103, 1154, 1155, 1156, 1178, 1233, 1234, 1251.

[0578] In some embodiments of the antibody or antigen-binding fragment provided herein, the V_{H} region and the V_{L} region are or comprise the sequence set forth in SEQ ID NO: 1001 and 1005, respectively. In some embodiments of the antibody or antigen-binding fragment provided herein, the V_{H} region and the V_{L} region are or comprise the sequence set forth in SEQ ID NO: 1009 and 1013, respectively. In some embodiments of the antibody or antigen-binding fragment provided herein, the V_{H} region and the V_{L} region are or comprise the sequence set forth in SEQ ID NO: 1015 and 1019, respectively. In some embodiments of the antibody or antigen-binding fragment provided herein, the V_{H} region and the V_{L} region are or comprise the sequence set forth in SEQ ID NO: 1015 and 1125, respectively. In some embodiments of the antibody or antigen-binding fragment provided herein, the V_{H} region and the V_{L} region are or comprise the sequence set forth in SEQ ID NO: 1023 and 1027, respectively. In some embodiments of the antibody or antigen-binding fragment provided herein, the V_{H} region and the V_{L} region are or comprise the sequence set forth in SEQ ID NO: 1031 and 1035, respectively. In some embodiments of the antibody or antigen-binding fragment provided herein, the V_{H} region and the V_{L} region are or comprise the sequence set forth in SEQ ID NO: 1039 and 1043, respectively. In some embodiments of the antibody or antigen-binding fragment provided herein, the V_{H} region and the V_{L} region are or comprise the sequence set forth in SEQ ID NO: 1047 and 1051, respectively. In some embodiments of the antibody or antigen-binding fragment provided herein, the V_{H} region and the V_{L} region are or comprise the sequence set forth in SEQ ID NO: 1053 and 1056, respectively. In some embodiments of the antibody or antigen-binding fragment provided herein, the V_{H} region and the V_{L} region are or comprise the sequence set forth in SEQ ID NO: 1059 and 1063, respectively. In some embodiments of the antibody or antigen-binding fragment provided herein, the V_{H} region and the V_{L} region are or comprise the sequence set forth in SEQ ID NO: 1066 and 1070, respectively. In some embodiments of the antibody or antigen-binding fragment provided herein, the V_{H} region and the V_{L} region are or comprise the sequence set forth in SEQ ID NO: 1073 and 1076, respectively. In some embodiments of the antibody or antigen-binding fragment provided herein, the V_{H} region and the V_{L} region are or comprise the sequence set forth in SEQ ID NO: 1078 and 1082, respectively. In some embodiments of the antibody or antigen-binding fragment provided herein, the V_{H} region and the V_{L} region are or comprise the sequence set forth in SEQ ID NO: 1084 and 1088, respectively. In some embodiments of the antibody or antigen-binding fragment provided herein, the V_{H} region and the V_{L} region are or comprise the sequence set forth in SEQ ID NO: 1090 and 1093, respectively. In some embodiments of the antibody or antigen-binding fragment provided herein, the V_{H} region and the V_{L} region are or comprise the sequence set forth in SEQ ID NO: 1094 and 1097, respectively. In some embodiments of the antibody or antigen-binding fragment provided herein, the V_{H} region and the V_{L} region are or comprise the sequence set forth in SEQ ID NO: 1100 and 1103, respectively. In some embodiments of the antibody or antigen-binding fragment provided herein, the V_{H} region and the V_{L} region are or comprise the sequence set forth in SEQ ID NO: 1031 and 1154, respectively. In some embodiments of the antibody or antigen-binding fragment provided herein, the V_{H} region and the V_{L} region are or comprise the sequence set forth in SEQ ID NO: 1039 and 1155, respectively. In some embodiments of the antibody or antigen-binding fragment provided herein, the V_{H} region and the V_{L} region are or comprise the sequence set forth in SEQ ID NO: 1059 and 1156, respectively. In some embodiments of the antibody or antigen-binding fragment provided herein, the V_{H} region and the V_{L} region are or comprise the sequence set forth in SEQ ID NO: 1066 and 1233, respectively. In some embodiments of the antibody or antigen-binding fragment provided herein, the V_{H} region and the V_{L} region are or comprise the sequence set forth in SEQ ID NO: 1094 and 1234, respectively. In some embodiments of the antibody or antigen-binding fragment provided herein, the V_{H} region and the V_{L} region are or comprise the sequence set forth in SEQ ID NO: 1100 and 1250, respectively

[0579] Table 9 provides exemplary amino acid sequences of antibody heavy chain variable domains (VHs) and light chain variable domains (VLs) that, in combination, bind to SLC34A2, with CDR-H1, CDR-H2, CDR-H3, CDR-L1, CDR-L2, and CDR-L3 sequences noted below the respective V_{H} or V_{L} sequence. The CDR sequences provided in Table 9 are annotated using the Kabat scheme.

TABLE 9
SLC34A2 VH and VL Amino Acid Sequences

| Clone | VH Sequence | VL Sequence |
|---|---|---|
| SLC34A2 | QVQLQESGPGLVKPSETLSLTCTVSGGSVSSG | EIVLTQSPDFQSVTPKEKVTITCRASQSVGSG |
| Ab 1 | NFYWSWIRQPPGKGLEWIGYIYYSGSTYYNP | LHWYQQKPDQSPKLLIKYASQSFSGVPSRFSG |
| | SLKSRVTISVDTSKNQFSLKLRSLTAADTAV | SGSGTDFTLTINSLEVEDAATFYCLQSSSLPW |
| | YYCARWMTKVKGYFDYWGQGTLVTVSS | TFGQGTKVEIK (SEQ ID NO: 1005) |
| | (SEQ ID NO: 1001) | RASQSVGSGLH (SEQ ID NO: 1006) |
| | SGNFYWS (SEQ ID NO: 1002) | YASQSFS (SEQ ID NO: 1007) |
| | YIYYSGSTYYNPSLKS (SEQ ID NO: | LQSSSLPWT (SEQ ID NO: 1008) |
| | 1003) | |
| | WMTKVKGYFDY (SEQ ID NO: 1004) | |
| SLC34A2 | QVQLQESGPGLVKPSETLSLTCTVSGGSVSSG | EIVLTQSPDFQSVTPKEKVTITCRASQSVGSG |
| Ab 2 | SYYWSWIRQAPGKGLEWIGYIYYSGSNYYNP | LHWYQQKPDQSPKLLIKYASQSFSGVPSRFSG |
| | SLKSRVTISVDTSKNQFSLKLRAVTAADTAV | SGSGTDFTLTINSLETEDAATYFCQQSSSLPW |
| | YYCARWMTTIKGYFDYWGQGTLVTVSS | TFGQGTKVEIK (SEQ ID NO: 1013) |
| | (SEQ ID NO: 1009) | RASQSVGSGLH (SEQ ID NO: 1006) |
| | SGSYYWS (SEQ ID NO: 1010) | YASQSFS (SEQ ID NO: 1007) |
| | YIYYSGSNYYNPSLKS (SEQ ID NO: | QQSSSLPWT (SEQ ID NO: 1014) |
| | 1011) | |
| | WMTTIKGYFDY (SEQ ID NO: 1012) | |
| SLC34A2 | QVQLVESGGGLVQPGRSLRLSCTGSGFTFGDY | AIRMTQSPSSLSASVGDRVTITCRASQDINNY |
| Ab 3.1 | AMNWVRQAPGKGLEWVGFIRTKPYGGTTEYA | LAWYQQKPGKVPKLLIYAASTLQSGVPSRFSG |
| | ASVKGRFTFSRDDSKSIAYLQMNSLKTEDTA | SGSGTDFTLTISSLQPEDVATYYSLNYYSVPW |
| | VYYCTMIPVLRFLEWLPWGQGTLVTVSS | TFGQGTKVEIK (SEQ ID NO: 1019) |
| | (SEQ ID NO: 1015) | RASQDINNYLA (SEQ ID NO: 1020) |
| | DYAMN (SEQ ID NO: 1016) | AASTLQS (SEQ ID NO: 1021) |
| | FIRTKPYGGTTEYAASVKG (SEQ ID NO: | LNYYSVPWT (SEQ ID NO: 1022) |
| | 1017) | |
| | IPVLRFLEWLP (SEQ ID NO: 1018) | |
| SLC34A2 | QVQLVESGGGLVQPGRSLRLSCTGSGFTFGDY | DIQMTQSPSSLSASVGDRVTITCRASQDINNY |
| Ab 3 | AMNWVRQAPGKGLEWVGFIRTKPYGGTTEYA | LAWYQQKPGKVPKLLIYAASTLQSGVPSRFSG |
| | ASVKGRFTFSRDDSKSIAYLQMNSLKTEDTA | SGSGTDFTLTISSLQPEDVATYYSLNYYSVPW |
| | VYYCTMIPVLRFLEWLPWGQGTLVTVSS | TFGQGTKVEIK (SEQ ID NO: 1125) |
| | (SEQ ID NO: 1015) | RASQDINNYLA (SEQ ID NO: 1020) |
| | DYAMN (SEQ ID NO: 1016) | AASTLQS (SEQ ID NO: 1021) |
| | FIRTKPYGGTTEYAASVKG (SEQ ID NO: | LNYYSVPWT (SEQ ID NO: 1022) |
| | 1017) | |
| | IPVLRFLEWLP (SEQ ID NO: 1018) | |
| SLC34A2 | QVQLLESGGGLVQPGGSLRLSCAASGFTFSSY | EIVLTQSPSSLSASVGDRVTITCRASQGISNY |
| Ab 4 | AMNWVRQAPGKGLEWVSAISGGVGNTYYADS | LAWYQQKPGKVPNLLIYTASTLQSGVPSRFSG |
| | VKGRFTISRDNSKNTLYLQMNSLRAEDTAVY | SGSGTDFTLTISSLQPEDVATYYCQKYNSAPF |
| | YCTKDGPLWGNYFDYWGRGTLVTVSS (SEQ | TFGPGTKVDIK (SEQ ID NO: 1027) |
| | ID NO: 1023) | RASQGISNYLA (SEQ ID NO: 1028) |
| | SYAMN (SEQ ID NO: 1024) | TASTLQS (SEQ ID NO: 1029) |
| | AISGGVGNTYYADSVKG (SEQ ID NO: | QKYNSAPFT (SEQ ID NO: 1030) |
| | 1025) | |
| | DGPLWGNYFDY (SEQ ID NO: 1026) | |
| SLC34A2 | QVQLQESGPGLVKPSETLSLTCSVSGGSISSS | AIRMTQSPSSLSASVGDRVTITCRASQSISSY |
| Ab 5.1 | SYYWGWIRQPPGKGLEWIGSIDYSGSTYYNP | LNWYQQKPGKAPKLLIYAASSLLTGVPSRFTG |
| | SLKSRVTISIDTSKNQFSLRLSSVTAAEKAV | SGSGTDFTLTISSLQPEDFGTYYCQQSYSPPL |
| | YYCARHGRGTIGYFDYWGQGTLVTVSS | TFGGGTKVEIK (SEQ ID NO: 1035) |
| | (SEQ ID NO: 1031) | RASQSISSYLN (SEQ ID NO: 1036) |
| | SSSYYWG (SEQ ID NO: 1032) | AASSLLT (SEQ ID NO: 1037) |
| | SIDYSGSTYYNPSLKS (SEQ ID NO: | QQSYSPPLT (SEQ ID NO: 1038) |
| | 1033) | |
| | HGRGTIGYFDY (SEQ ID NO: 1034) | |
| SLC34A2 | QVQLQESGPGLVKPSETLSLTCSVSGGSISSS | DIQMTQSPSSLSASVGDRVTITCRASQSISSY |
| Ab 5 | SYYWGWIRQPPGKGLEWIGSIDYSGSTYYNP | LNWYQQKPGKAPKLLIYAASSLLTGVPSRFTG |
| | SLKSRVTISIDTSKNQFSLRLSSVTAAEKAV | SGSGTDFTLTISSLQPEDFGTYYCQQSYSPPL |
| | YYCARHGRGTIGYFDYWGQGTLVTVSS | TFGGGTKVEIK (SEQ ID NO: 1154) |
| | (SEQ ID NO: 1031) | RASQSISSYLN (SEQ ID NO: 1036) |
| | SSSYYWG (SEQ ID NO: 1032) | AASSLLT (SEQ ID NO: 1037) |
| | SIDYSGSTYYNPSLKS (SEQ ID NO: | QQSYSPPLT (SEQ ID NO: 1038) |
| | 1033) | |
| | HGRGTIGYFDY (SEQ ID NO: 1034) | |
| SLC34A2 | QVQLLESGGGLVQPGGSLRLSCAASGFTFSSS | AIRMTQSPSSLSASVGDRVTIACRASQVISNY |
| Ab 6.1 | AMAWVRQAPGKGLEWVSAISSSGDNTYYADS | LAWYQQKPGKVPKLLIYVASTLQSGVPSRFSG |
| | VKGRFTISRDTSKNTLSLQMSSLRAEDTAIY | SGSGTDFTLTISSLQPEDVATYYCQNYNSAPW |
| | YCAKQGTNWGLYFDYWGQGTLVTVSS (SEQ | TFGQGTKLEIK (SEQ ID NO: 1043) |
| | ID NO: 1039) | RASQVISNYLA (SEQ ID NO: 1044) |
| | SSAMA (SEQ ID NO: 1040) | VASTLQS (SEQ ID NO: 1045) |
| | AISSSGDNTYYADSVKG (SEQ ID NO: | QNYNSAPWT (SEQ ID NO: 1046) |
| | 1041) | |
| | QGTNWGLYFDY (SEQ ID NO: 1042) | |
| SLC34A2 | QVQLLESGGGLVQPGGSLRLSCAASGFTFSSS | DIQMTQSPSSLSASVGDRVTIACRASQVISNY |
| Ab 6 | AMAWVRQAPGKGLEWVSAISSSGDNTYYADS | LAWYQQKPGKVPKLLIYVASTLQSGVPSRFSG |
| | VKGRFTISRDTSKNTLSLQMSSLRAEDTAIY | SGSGTDFTLTISSLQPEDVATYYCQNYNSAPW |
| | YCAKQGTNWGLYFDYWGQGTLVTVSS (SEQ | TFGQGTKLEIK (SEQ ID NO: 1155) |
| | ID NO: 1039) | RASQVISNYLA (SEQ ID NO: 1044) |
| | SSAMA (SEQ ID NO: 1040) | VASTLQS (SEQ ID NO: 1045) |
| | AISSSGDNTYYADSVKG (SEQ ID NO: | QNYNSAPWT (SEQ ID NO: 1046) |
| | 1041) | |
| | QGTNWGLYFDY (SEQ ID NO: 1042) | |
| SLC34A2 | QVQLQESGPELVKPSETLSITCTVSGGSISSR | EIVLTQSPSSLSASVGDRVTITCRASQSISSY |
| Ab 7 | SYYWGWIRQPPGKGLEWIGSIYYGGSTYYNP | LNWYQQKPGRAPELLIYAASSLQSGVPSRFSG |
| | SLKSRVTISADTSKNQFSLKLNSVTAADTAV | SGSGTDFTLTISSLQPEDFATYYCQQSFSSLT |
| | FYCVRHPAGYSTRWSAFDIWGQGTMVTVSS | FGQGTRLEIK (SEQ ID NO: 1051) |
| | (SEQ ID NO: 1047) | RASQSISSYLN (SEQ ID NO: 1036) |
| | SRSYYWG (SEQ ID NO: 1048) | AASSLQS (SEQ ID NO: 15) |
| | SIYYGGSTYYNPSLKS (SEQ ID NO: | QQSFSSLT (SEQ ID NO: 1052) |
| | 1049) | |
| | HPAGYSTRWSAFDI (SEQ ID NO: | |
| | 1050) | |
| SLC34A2 | QVQLQESGPGLVKPSETLSLTCTVSGGSISSR | EIVLTQSPSSLSASVGDRVTITCRASQSISSY |
| Ab 8 | SYYWGWIRQPPGKGPEWIGSIYYSGSTFYNP | LNWYQLKPGKAPKLLIYAASSLHSGVPSRFSG |
| | SLKSRVTISEDTSKSQFSLKVTSVTAADTAV | SGSGTDFTLTISSLQPADFATYYCQQAYISLT |
| | YYCARHPAGYSSSWSAFDIWGQGTMVTVSS | FGQGTRLEIK (SEQ ID NO: 1056) |
| | (SEQ ID NO: 1053) | RASQSISSYLN (SEQ ID NO: 1036) |
| | SRSYYWG (SEQ ID NO: 1048) | AASSLHS (SEQ ID NO: 1057) |
| | SIYYSGSTFYNPSLKS (SEQ ID NO: | QQAYISLT (SEQ ID NO: 1058) |
| | 1054) | |
| | HPAGYSSSWSAFDI (SEQ ID NO: 1055) | |
| SLC34A2 | QVQLVESGGGLVQPGRSLRLSCSGSGFTSGDY | AIRMTQSPSSLSAFVGDRVTITCRASQDIGNY |
| Ab 9.1 | AVSWVRQAPGKGLEWVGFIRTKPYGETTEYA | LAWYQQTPEKVPKLLIYAASTLQSGVPSRFSG |
| | ASVKGRFTISRDDSKSIAYLQMNSLKAEDTA | SGSGTDFTLTISSLQPEDVATYYCQNYYSVPW |
| | VFYCTFIPVSRFLEWLPWGQGIPVTVSS | TFGQGTKVEIK (SEQ ID NO: 1063) |
| | (SEQ ID NO: 1059) | RASQDIGNYLA (SEQ ID NO: 1064) |
| | DYAVS (SEQ ID NO: 1060) | AASTLQS (SEQ ID NO: 1021) |
| | FIRTKPYGETTEYAASVKG (SEQ ID NO: | QNYYSVPWT (SEQ ID NO: 1065) |
| | 1061) | |
| | IPVSRFLEWLP (SEQ ID NO: 1062) | |
| SLC34A2 | QVQLVESGGGLVQPGRSLRLSCSGSGFTSGDY | DIQMTQSPSSLSAFVGDRVTITCRASQDIGNY |
| Ab 9 | AVSWVRQAPGKGLEWVGFIRTKPYGETTEYA | LAWYQQTPEKVPKLLIYAASTLQSGVPSRFSG |
| | ASVKGRFTISRDDSKSIAYLQMNSLKAEDTA | SGSGTDFTLTISSLQPEDVATYYCQNYYSVPW |
| | VFYCTFIPVSRFLEWLPWGQGIPVTVSS | TFGQGTKVEIK (SEQ ID NO: 1156) |
| | (SEQ ID NO: 1059) | RASQDIGNYLA (SEQ ID NO: 1064) |
| | DYAVS (SEQ ID NO: 1060) | AASTLQS (SEQ ID NO: 1021) |
| | FIRTKPYGETTEYAASVKG (SEQ ID NO: | QNYYSVPWT (SEQ ID NO: 1065) |
| | 1061) | |
| | IPVSRFLEWLP (SEQ ID NO: 1062) | |
| SLC34A2 | QVQLLESGGGLVQPGASLRLSCAASGFTFSTY | AIRMTQSPSSLSASVGDRVTITCRASQGISNY |
| Ab 10.1 | AMTWVRQAPGKGLEWVSGINGGGDTTYYADS | LAWYQQRPGKVPKLLIYAASTLRSGVPSRFSG |
| | VKGRFTISRDNSKNTLYLQMNSLRAEDTAVY | SGSGTDFTLTISSLQPEDVATYYCQKYNSAPL |
| | YCAVRGYTYGYFFDYWGQGTLVTVSS (SEQ | TFGGGTKVEIK (SEQ ID NO: 1070) |
| | ID NO: 1066) | RASQGISNYLA (SEQ ID NO: 1028) |
| | TYAMT (SEQ ID NO: 1067) | AASTLRS (SEQ ID NO: 1071) |
| | GINGGGDTTYYADSVKG (SEQ ID NO: | QKYNSAPLT (SEQ ID NO: 1072) |
| | 1068) | |
| | RGYTYGYFFDY (SEQ ID NO: 1069) | |
| SLC34A2 | QVQLLESGGGLVQPGASLRLSCAASGFTFSTY | DIQMTQSPSSLSASVGDRVTITCRASQGISNY |
| Ab 10 | AMTWVRQAPGKGLEWVSGINGGGDTTYYADS | LAWYQQRPGKVPKLLIYAASTLRSGVPSRFSG |
| | VKGRFTISRDNSKNTLYLQMNSLRAEDTAVY | SGSGTDFTLTISSLQPEDVATYYCQKYNSAPL |
| | YCAVRGYTYGYFFDYWGQGTLVTVSS (SEQ | TFGGGTKVEIK (SEQ ID NO: 1233) |
| | ID NO: 1066) | RASQGISNYLA (SEQ ID NO: 1028) |
| | TYAMT (SEQ ID NO: 1067) | AASTLRS (SEQ ID NO: 1071) |
| | GINGGGDTTYYADSVKG (SEQ ID NO: | QKYNSAPLT (SEQ ID NO: 1072) |
| | 1068) | |
| | RGYTYGYFFDY (SEQ ID NO: 1069) | |
| SLC34A2 | QVQLQESGPGLVKPSETLSLTCTVSGGSISSS | EIVLTQSPSSLSASVGDRLTITCRASQTISSY |
| Ab 11 | SYYWGWIRQPPGKGLEWIGSLYYSGSTYYNP | LNWYQQKPGKAPKVLIYAASSLQSGVPSRFSG |
| | SLKSRVTISVDTSKNQFSLKLNSVTAADTAV | SGSGTDFTLTISSLQPEDFATYYCQQSFIIPY |
| | YYCTRHPRGIAARWGNWFDPWGQGTLVTVSS | TFGQGTKLEIK (SEQ ID NO: 1076) |
| | (SEQ ID NO: 1073) | RASQTISSYLN (SEQ ID NO: 1251) |
| | SSSYYWG (SEQ ID NO: 1032) | AASSLQS (SEQ ID NO: 15) |
| | SLYYSGSTYYNPSLKS (SEQ ID NO: | QQSFIIPYT (SEQ ID NO: 1077) |
| | 1074) | |
| | HPRGIAARWGNWFDP (SEQ ID NO: | |
| | 1075) | |
| SLC34A2 | QVQLQESGPGLVKPSETLSLTCTVSGGSISSS | EIVLTQSPSSLSASVGDRVTITCRASQSISSY |
| Ab 12 | SYYRGWIRQPPGKGLEWIGSIYYSGSTYYNP | LNWYQQKPGKAPKLLIYAASSLQSGVPSRFSG |
| | SLKSRVTISVDTSKNQFSLKLSSVTAADTAV | SGSGTDFTLTISSLQPEDFATYYCQQSYSTPF |
| | YYCARHPRGSYGANFDYWGQGTLVTVSS | TFGPGTKVDIK (SEQ ID NO: 1082) |
| | (SEQ ID NO: 1078) | RASQSISSYLN (SEQ ID NO: 1036) |
| | SSSYYRG (SEQ ID NO: 1079) | AASSLQS (SEQ ID NO: 15) |
| | SIYYSGSTYYNPSLKS (SEQ ID NO: | QQSYSTPFT (SEQ ID NO: 1083) |
| | 1080) | |
| | HPRGSYGANFDY (SEQ ID NO: 1081) | |
| SLC34A2 | QVQLVESGGGLVQPGRSLRLSCIGSGFTFGEY | EIVLTQSPSSLSASVGDRVTVTCRANQDINNY |
| Ab 13 | AMSWVRQAPGKGLEWVGFIRTKPYGGTTEFA | LAWYQQTPGKVPKLLIYAASTLQSGVPSRFSG |
| | ASVKGRFTMSRDDSKSIAYLEMNSLKTEDTA | SGSGTDFTLTISSLQPEDVATYYCQNYYSVPW |
| | VYYCTLIPALRFLEWLPWGQGTLVTVSS | TFGQGTKLEIK (SEQ ID NO: 1088) |
| | (SEQ ID NO: 1084) | RANQDINNYLA (SEQ ID NO: 1089) |
| | EYAMS (SEQ ID NO: 1085) | AASTLQS (SEQ ID NO: 1021) |
| | FIRTKPYGGTTEFAASVKG (SEQ ID NO: | QNYYSVPWT (SEQ ID NO: 1065) |
| | 1086) | |
| | IPALRFLEWLP (SEQ ID NO: 1087) | |
| SLC34A2 | QVQLQESGPGLVKPSETLSLTCTVSGGSVSSG | EIVLTQSPDFQSVTPKESVTITCRASQSVGSG |
| Ab 14 | SYYWSWIRQPPGKGLEWIGYIFYSGSTYYNP | LHWYQQKPDQSPKLLIKYASQSFSGVPSRFSG |
| | SLKSRVTISVDTSKNQFSLKLTSVTAADTAV | SGSGTDFTLTINSLEAEDAATYYCLQSSSLPW |
| | YFCARWMTTVKGYFDYWGQGTLVTVSS | TFGQGTKVEIK (SEQ ID NO: 1093) |
| | (SEQ ID NO: 1090) | RASQSVGSGLH (SEQ ID NO: 1006) |
| | SGSYYWS (SEQ ID NO: 1010) | YASQSFS (SEQ ID NO: 1007) |
| | YIFYSGSTYYNPSLKS (SEQ ID NO: | LQSSSLPWT (SEQ ID NO: 1008) |
| | 1091) | |
| | WMTTVKGYFDY (SEQ ID NO: 1092) | |
| SLC34A2 | QVQLQESGPGLVKPSETLSLTCTVSGGSVSSA | AIRMTQSPSSLSASVGDRVTITCRASQSISSY |
| Ab 15.1 | SYYWSWIRQPPGKGLEYIGYIYYSGSTYYNP | LNWYQQKPGKAPKFLISPASSLQSGVPSRFSG |
| | SLKSRVTISIDTSKNQFSLNLRSVTAADTAV | SGSGTDFTLTISSLQPEDFATYYCQQSYSIPW |
| | YYCARYIVGRPGFNWFDPWGQGTLVTVSS | TFGQGTKVEIK (SEQ ID NO: 1097) |
| | (SEQ ID NO: 1094) | RASQSISSYLN (SEQ ID NO: 1036) |
| | SASYYWS (SEQ ID NO: 1095) | PASSLQS (SEQ ID NO: 1098) |
| | YIYYSGSTYYNPSLKS (SEQ ID NO: | QQSYSIPWT (SEQ ID NO: 1099) |
| | 1003) | |
| | YIVGRPGFNWFDP (SEQ ID NO: 1096) | |
| SLC34A2 | QVQLQESGPGLVKPSETLSLTCTVSGGSVSSA | DIQMTQSPSSLSASVGDRVTITCRASQSISSY |
| Ab 15 | SYYWSWIRQPPGKGLEYIGYIYYSGSTYYNP | LNWYQQKPGKAPKFLISPASSLQSGVPSRFSG |
| | SLKSRVTISIDTSKNQFSLNLRSVTAADTAV | SGSGTDFTLTISSLQPEDFATYYCQQSYSIPW |
| | YYCARYIVGRPGFNWFDPWGQGTLVTVSS | TFGQGTKVEIK (SEQ ID NO: 1234) |
| | (SEQ ID NO: 1094) | RASQSISSYLN (SEQ ID NO: 1036) |
| | SASYYWS (SEQ ID NO: 1095) | PASSLQS (SEQ ID NO: 1098) |
| | YIYYSGSTYYNPSLKS (SEQ ID NO: | QQSYSIPWT (SEQ ID NO: 1099) |
| | 1003) | |
| | YIVGRPGFNWFDP (SEQ ID NO: 1096) | |
| SLC34A2 | QVQLQESGPGLVKPSETLSLTCTVSGDSVSSV | AIRMTQSPSSLSASVGDRVTITCRASQTISSY |
| Ab 16.1 | SYYWSWIRQPPGKGLEWIGYIWYSGSTYYNP | LNWYQQKPGKAPKLLISPASNLQSGVPSRFSG |
| | SLKSRVTISIDTSKNQFSLKLRSVTAADTAV | SGSGTDFTLTISSLQPEDFATYYCQQSYIIPW |
| | YYCARYIVGRPGFNWFDPWGQGTLVTVSS | TFGQGTKVEIK (SEQ ID NO: 1103) |
| | (SEQ ID NO: 1100) | RASQTISSYLN (SEQ ID NO: 1251) |
| | SVSYYWS (SEQ ID NO: 1101) | PASNLQS (SEQ ID NO: 1104) |
| | YIWYSGSTYYNPSLKS (SEQ ID NO: | QQSYIIPWT (SEQ ID NO: 1105) |
| | 1102) | |
| | YIVGRPGFNWFDP (SEQ ID NO: 1096) | |
| SLC34A2 | QVQLQESGPGLVKPSETLSLTCTVSGDSVSSV | DIQMTQSPSSLSASVGDRVTITCRASQTISSY |
| Ab 16 | SYYWSWIRQPPGKGLEWIGYIWYSGSTYYNP | LNWYQQKPGKAPKLLISPASNLQSGVPSRFSG |
| | SLKSRVTISIDTSKNQFSLKLRSVTAADTAV | SGSGTDFTLTISSLQPEDFATYYCQQSYIIPW |
| | YYCARYIVGRPGFNWFDPWGQGTLVTVSS | TFGQGTKVEIK (SEQ ID NO: 1250) |
| | (SEQ ID NO: 1100) | RASQTISSYLN (SEQ ID NO: 1251) |
| | SVSYYWS (SEQ ID NO: 1101) | PASNLQS (SEQ ID NO: 1104) |
| | YIWYSGSTYYNPSLKS (SEQ ID NO: | QQSYIIPWT (SEQ ID NO: 1105) |
| | 1102) | |
| | YIVGRPGFNWFDP (SEQ ID NO: 1096) | |

[0580] In various embodiments, the antigen-binding fragment that binds to SLC34A2 comprises an scFv. In some embodiments, the scFv has the format V_{H}-L-V_{L} or V_{L}-L-V_{H}, wherein L is a linker peptide and the V_{H} and V_{L} are any V_{H} and V_{L} disclosed herein. In some embodiments, the scFv has the format V_{H}-L-V_{L}, wherein L is a linker peptide. In some embodiments, the scFv has the format V_{L}-L-V_{H}, wherein L is a linker peptide. In some embodiments, the linker peptide comprises the amino acid sequence of GGGGSGGGGSGGGGS (SEQ ID NO: 819). In some embodiments, the linker peptide comprises the amino acid sequence of GGGGSGSGGGGSGGGGS (SEQ ID NO: 820). In some embodiments, the linker peptide comprises the amino acid sequence of GSTSGSGKPGSGEGSTKG (SEQ ID NO: 998). Table 10 provides exemplary amino acid sequences of scFvs that bind to SLC34A2. The linker peptide linking the V_{H} to the V_{L} is indicated in bold italic text.

TABLE 10
SLC34A2 scFv Amino Acid Sequences

| Clone | scFv Sequence |
|---|---|
| SLC34A2 Ab 1 | EIVLTQSPDFQSVTPKEKVTITCRASQSVGSGLHWYQQKPDQSPKLLIKYASQSFSGVPSRF |
| scFv (VL-VH) | SGSGSGTDFTLTINSLEVEDAATFYCLQSSSLPWTFGQGTKVEIKGSTSGSGKPGSGEGSTK |
| SEQ ID NO: 1107 | GQVQLQESGPGLVKPSETLSLTCTVSGGSVSSGNFYWSWIRQPPGKGLEWIGYIYYSGSTYY |
| | NPSLKSRVTISVDTSKNQFSLKLRSLTAADTAVYYCARWMTKVKGYFDYWGQGTLVTVSS |
| SLC34A2 Ab 1 | QVQLQESGPGLVKPSETLSLTCTVSGGSVSSGNFYWSWIRQPPGKGLEWIGYIYYSGSTYYN |
| scFv (VH-VL) | PSLKSRVTISVDTSKNQFSLKLRSLTAADTAVYYCARWMTKVKGYFDYWGQGTLVTVSSGST |
| SEQ ID NO: 1126 | SGSGKPGSGEGSTKGEIVLTQSPDFQSVTPKEKVTITCRASQSVGSGLHWYQQKPDQSPKLL |
| | IKYASQSFSGVPSRFSGSGSGTDFTLTINSLEVEDAATFYCLQSSSLPWTFGQGTKVEIK |
| SLC34A2 Ab 2 | EIVLTQSPDFQSVTPKEKVTITCRASQSVGSGLHWYQQKPDQSPKLLIKYASQSFSGVPSRF |
| scFv | SGSGSGTDFTLTINSLETEDAATYFCQQSSSLPWTFGQGTKVEIKGSTSGSGKPGSGEGSTK |
| (VL-VH) | GQVQLQESGPGLVKPSETLSLTCTVSGGSVSSGSYYWSWIRQAPGKGLEWIGYIYYSGSNYY |
| SEQ ID NO: 1108 | NPSLKSRVTISVDTSKNQFSLKLRAVTAADTAVYYCARWMTTIKGYFDYWGQGTLVTVSS |
| SLC34A2 Ab 2 | QVQLQESGPGLVKPSETLSLTCTVSGGSVSSGSYYWSWIRQAPGKGLEWIGYIYYSGSNYYN |
| scFv (VH-VL) | PSLKSRVTISVDTSKNQFSLKLRAVTAADTAVYYCARWMTTIKGYFDYWGQGTLVTVSSGST |
| SEQ ID NO: 1127 | SGSGKPGSGEGSTKGEIVLTQSPDFQSVTPKEKVTITCRASQSVGSGLHWYQQKPDQSPKLL |
| | IKYASQSFSGVPSRFSGSGSGTDFTLTINSLETEDAATYFCQQSSSLPWTFGQGTKVEIK |
| SLC34A2 Ab 3 | DIQMTQSPSSLSASVGDRVTITCRASQDINNYLAWYQQKPGKVPKLLIYAASTLQSGVPSRF |
| scFv (VL-VH) | SGSGSGTDFTLTISSLQPEDVATYYSLNYYSVPWTFGQGTKVEIKGSTSGSGKPGSGEGSTK |
| SEQ ID NO: 1109 | GQVQLVESGGGLVQPGRSLRLSCTGSGFTFGDYAMNWVRQAPGKGLEWVGFIRTKPYGGTTE |
| | YAASVKGRFTFSRDDSKSIAYLQMNSLKTEDTAVYYCTMIPVLRFLEWLPWGQGTLVTVSS |
| SLC34A2 Ab 3 | QVQLVESGGGLVQPGRSLRLSCTGSGFTFGDYAMNWVRQAPGKGLEWVGFIRTKPYGGTTEY |
| scFv (VH-VL) | AASVKGRFTFSRDDSKSIAYLQMNSLKTEDTAVYYCTMIPVLRFLEWLPWGQGTLVTVSSGS |
| SEQ ID NO: 1128 | TSGSGKPGSGEGSTKGDIQMTQSPSSLSASVGDRVTITCRASQDINNYLAWYQQKPGKVPKL |
| | LIYAASTLQSGVPSRFSGSGSGTDFTLTISSLQPEDVATYYSLNYYSVPWTFGQGTKVEIK |
| SLC34A2 Ab 4 | DIQMTQSPSSLSASVGDRVTITCRASQGISNYLAWYQQKPGKVPNLLIYTASTLQSGVPSRF |
| scFv (VL-VH) | SGSGSGTDFTLTISSLQPEDVATYYCQKYNSAPFTFGPGTKVDIKGSTSGSGKPGSGEGSTK |
| SEQ ID NO: | GQVQLLESGGGLVQPGGSLRLSCAASGFTFSSYAMNWVRQAPGKGLEWVSAISGGVGNTYYA |
| 1129 | DSVKGRFTISRDNSKNTLYLQMNSLRAEDTAVYYCTKDGPLWGNYFDYWGRGTLVTVSS |
| SLC34A2 Ab 4 | QVQLLESGGGLVQPGGSLRLSCAASGFTFSSYAMNWVRQAPGKGLEWVSAISGGVGNTYYAD |
| scFv (VH-VL) | SVKGRFTISRDNSKNTLYLQMNSLRAEDTAVYYCTKDGPLWGNYFDYWGRGTLVTVSSGSTS |
| SEQ ID NO: 1130 | GSGKPGSGEGSTKGDIQMTQSPSSLSASVGDRVTITCRASQGISNYLAWYQQKPGKVPNLLI |
| | YTASTLQSGVPSRFSGSGSGTDFTLTISSLQPEDVATYYCQKYNSAPFTFGPGTKVDIK |
| SLC34A2 Ab 5 | DIQMTQSPSSLSASVGDRVTITCRASQSISSYLNWYQQKPGKAPKLLIYAASSLLTGVPSRF |
| scFv (VL-VH) | TGSGSGTDFTLTISSLQPEDFGTYYCQQSYSPPLTFGGGTKVEIKGSTSGSGKPGSGEGSTK |
| SEQ ID NO: 1131 | GQVQLQESGPGLVKPSETLSLTCSVSGGSISSSSYYWGWIRQPPGKGLEWIGSIDYSGSTYY |
| | NPSLKSRVTISIDTSKNQFSLRLSSVTAAEKAVYYCARHGRGTIGYFDYWGQGTLVTVSS |
| SLC34A2 Ab 6 | DIQMTQSPSSLSASVGDRVTIACRASQVISNYLAWYQQKPGKVPKLLIYVASTLQSGVPSRF |
| scFv (VL-VH) | SGSGSGTDFTLTISSLQPEDVATYYCQNYNSAPWTFGQGTKLEIKGSTSGSGKPGSGEGSTK |
| SEQ ID NO: 1132 | GQVQLLESGGGLVQPGGSLRLSCAASGFTFSSSAMAWVRQAPGKGLEWVSAISSSGDNTYYA |
| | DSVKGRFTISRDTSKNTLSLQMSSLRAEDTAIYYCAKQGTNWGLYFDYWGQGTLVTVSS |
| SLC34A2 Ab 6 | QVQLLESGGGLVQPGGSLRLSCAASGFTESSSAMAWVRQAPGKGLEWVSAISSSGDNTYYAD |
| scFv (VH-VL) | SVKGRFTISRDTSKNTLSLQMSSLRAEDTAIYYCAKQGTNWGLYFDYWGQGTLVTVSSGSTS |
| SEQ ID NO: 1133 | GSGKPGSGEGSTKGDIQMTQSPSSLSASVGDRVTIACRASQVISNYLAWYQQKPGKVPKLLI |
| | YVASTLQSGVPSRFSGSGSGTDFTLTISSLQPEDVATYYCQNYNSAPWTFGQGTKLEIK |
| SLC34A2 Ab 7 | EIVLTQSPSSLSASVGDRVTITCRASQSISSYLNWYQQKPGRAPELLIYAASSLQSGVPSRF |
| scFv (VL-VH) | SGSGSGTDFTLTISSLQPEDFATYYCQQSFSSLTFGQGTRLEIKGSTSGSGKPGSGEGSTKG |
| SEQ ID NO: 1134 | QVQLQESGPELVKPSETLSITCTVSGGSISSRSYYWGWIRQPPGKGLEWIGSIYYGGSTYYN |
| | PSLKSRVTISADTSKNQFSLKLNSVTAADTAVFYCVRHPAGYSTRWSAFDIWGQGTMVTVSS |
| SLC34A2 Ab 8 | EIVLTQSPSSLSASVGDRVTITCRASQSISSYLNWYQLKPGKAPKLLIYAASSLHSGVPSRF |
| scFv (VL-VH) | SGSGSGTDFTLTISSLQPADFATYYCQQAYISLTFGQGTRLEIKGSTSGSGKPGSGEGSTKG |
| SEQ ID NO: 1135 | QVQLQESGPGLVKPSETLSLTCTVSGGSISSRSYYWGWIRQPPGKGPEWIGSIYYSGSTFYN |
| | PSLKSRVTISEDTSKSQFSLKVTSVTAADTAVYYCARHPAGYSSSWSAFDIWGQGTMVTVSS |
| SLC34A2 Ab 9 | DIQMTQSPSSLSAFVGDRVTITCRASQDIGNYLAWYQQTPEKVPKLLIYAASTLQSGVPSRF |
| scFv (VL-VH) | SGSGSGTDFTLTISSLQPEDVATYYCQNYYSVPWTFGQGTKVEIKGSTSGSGKPGSGEGSTK |
| SEQ ID NO: 1136 | GQVQLVESGGGLVQPGRSLRLSCSGSGFTSGDYAVSWVRQAPGKGLEWVGFIRTKPYGETTE |
| | YAASVKGRFTISRDDSKSIAYLQMNSLKAEDTAVFYCTFIPVSRFLEWLPWGQGIPVTVSS |
| SLC34A2 Ab 10 | DIQMTQSPSSLSASVGDRVTITCRASQGISNYLAWYQQRPGKVPKLLIYAASTLRSGVPSRF |
| scFv (VL-VH) | SGSGSGTDFTLTISSLQPEDVATYYCQKYNSAPLTFGGGTKVEIKGSTSGSGKPGSGEGSTK |
| SEQ ID NO: 1137 | GQVQLLESGGGLVQPGASLRLSCAASGFTFSTYAMTWVRQAPGKGLEWVSGINGGGDTTYYA |
| | DSVKGRFTISRDNSKNTLYLQMNSLRAEDTAVYYCAVRGYTYGYFFDYWGQGTLVTVSS |
| SLC34A2 Ab 11 | EIVLTQSPSSLSASVGDRLTITCRASQTISSYLNWYQQKPGKAPKVLIYAASSLQSGVPSRF |
| scFv (VL-VH) | SGSGSGTDFTLTISSLQPEDFATYYCQQSFIIPYTFGQGTKLEIKGSTSGSGKPGSGEGSTK |
| SEQ ID NO: 1138 | GQVQLQESGPGLVKPSETLSLTCTVSGGSISSSSYYWGWIRQPPGKGLEWIGSLYYSGSTYY |
| | NPSLKSRVTISVDTSKNQFSLKLNSVTAADTAVYYCTRHPRGIAARWGNWEDPWGQGTLVTV |
| | SS |
| SLC34A2 Ab 12 | EIVLTQSPSSLSASVGDRVTITCRASQSISSYLNWYQQKPGKAPKLLIYAASSLQSGVPSRF |
| scFv (VL-VH) | SGSGSGTDFTLTISSLQPEDFATYYCQQSYSTPFTFGPGTKVDIKGSTSGSGKPGSGEGSTK |
| SEQ ID NO: 1139 | GQVQLQESGPGLVKPSETLSLTCTVSGGSISSSSYYRGWIRQPPGKGLEWIGSIYYSGSTYY |
| | NPSLKSRVTISVDTSKNQFSLKLSSVTAADTAVYYCARHPRGSYGANFDYWGQGTLVTVSS |
| SLC34A2 Ab 12 | QVQLQESGPGLVKPSETLSLTCTVSGGSISSSSYYRGWIRQPPGKGLEWIGSIYYSGSTYYN |
| scFv (VH-VL) | PSLKSRVTISVDTSKNQFSLKLSSVTAADTAVYYCARHPRGSYGANFDYWGQGTLVTVSSGS |
| SEQ ID NO: 1140 | TSGSGKPGSGEGSTKGEIVLTQSPSSLSASVGDRVTITCRASQSISSYLNWYQQKPGKAPKL |
| | LIYAASSLQSGVPSRFSGSGSGTDFTLTISSLQPEDFATYYCQQSYSTPFTFGPGTKVDIK |
| SLC34A2 Ab 13 | DIQMTQSPSSLSASVGDRVTVTCRANQDINNYLAWYQQTPGKVPKLLIYAASTLQSGVPSRF |
| scFv (VL-VH) | SGSGSGTDFTLTISSLQPEDVATYYCQNYYSVPWTFGQGTKLEIKGSTSGSGKPGSGEGSTK |
| SEQ ID NO: 1141 | GQVQLVESGGGLVQPGRSLRLSCIGSGFTFGEYAMSWVRQAPGKGLEWVGFIRTKPYGGTTE |
| | FAASVKGRFTMSRDDSKSIAYLEMNSLKTEDTAVYYCTLIPALRFLEWLPWGQGTLVTVSS |
| SLC34A2 Ab 14 | EIVLTQSPDFQSVTPKESVTITCRASQSVGSGLHWYQQKPDQSPKLLIKYASQSFSGVPSRF |
| scFv (VL-VH) | SGSGSGTDFTLTINSLEAEDAATYYCLQSSSLPWTFGQGTKVEIKGSTSGSGKPGSGEGSTK |
| SEQ ID NO: 1142 | GQVQLQESGPGLVKPSETLSLTCTVSGGSVSSGSYYWSWIRQPPGKGLEWIGYIFYSGSTYY |
| | NPSLKSRVTISVDTSKNQFSLKLTSVTAADTAVYFCARWMTTVKGYFDYWGQGTLVTVSS |
| SLC34A2 Ab 15 | DIQMTQSPSSLSASVGDRVTITCRASQSISSYLNWYQQKPGKAPKFLISPASSLQSGVPSRF |
| scFv (VL-VH) | SGSGSGTDFTLTISSLQPEDFATYYCQQSYSIPWTFGQGTKVEIKGSTSGSGKPGSGEGSTK |
| SEQ ID NO: 1143 | GQVQLQESGPGLVKPSETLSLTCTVSGGSVSSASYYWSWIRQPPGKGLEYIGYIYYSGSTYY |
| | NPSLKSRVTISIDTSKNQFSLNLRSVTAADTAVYYCARYIVGRPGFNWFDPWGQGTLVTVSS |
| SLC34A2 Ab 16 | DIQMTQSPSSLSASVGDRVTITCRASQTISSYLNWYQQKPGKAPKLLISPASNLQSGVPSRF |
| scFv (VL-VH) | SGSGSGTDFTLTISSLQPEDFATYYCQQSYIIPWTFGQGTKVEIKGSTSGSGKPGSGEGSTK |
| SEQ ID NO: 1144 | GQVQLQESGPGLVKPSETLSLTCTVSGDSVSSVSYYWSWIRQPPGKGLEWIGYIWYSGSTYY |
| | NPSLKSRVTISIDTSKNQFSLKLRSVTAADTAVYYCARYIVGRPGENWEDPWGQGTLVTVSS |
| SLC34A2 Ab 16 | QVQLQESGPGLVKPSETLSLTCTVSGDSVSSVSYYWSWIRQPPGKGLEWIGYIWYSGSTYYN |
| scFv (VH-VL) | PSLKSRVTISIDTSKNQFSLKLRSVTAADTAVYYCARYIVGRPGFNWEDPWGQGTLVTVSSG |
| SEQ ID NO: 1145 | STSGSGKPGSGEGSTKGDIQMTQSPSSLSASVGDRVTITCRASQTISSYLNWYQQKPGKAPK |
| | LLISPASNLQSGVPSRFSGSGSGTDFTLTISSLQPEDFATYYCQQSYIIPWTFGQGTKVEIK |

[0581] In some embodiments, the antibody or antigen-binding fragment that binds to SLC34A2 comprises an scFv comprising an amino acid sequence at least 80%, at least 85%, at least 90%, at least 91%, at least 92%, at least 93%, at least 94%, at least 95%, at least 96%, at least 97%, at least 98%, at least 99%, at least 99.5% or 100% identical to an amino acid sequence selected from the sequence as set forth in SEQ ID NOs: 1107, 1126, 1108, 1127, 1109, 1128, 1129, 1130, 1131, 1132, 1133, 1134, 1135, 1136, 1137, 1138, 1139, 1140, 1141, 1142, 1143, 1144, or 1145, optionally, wherein the V_{H} CDRs and the V_{L} CDRs are identical to those in SEQ ID NOs: 1107, 1126, 1108, 1127, 1109, 1128, 1129, 1130, 1131, 1132, 1133, 1134, 1135, 1136, 1137, 1138, 1139, 1140, 1141, 1142, 1143, 1144, or 1145, respectively. In some embodiments, the antibody or antigen-binding fragment that binds to SLC34A2 comprises an scFv comprising the amino acid sequence selected from the sequence as set forth in SEQ ID NOs: 1107, 1126, 1108, 1127, 1109, 1128, 1129, 1130, 1131, 1132, 1133, 1134, 1135, 1136, 1137, 1138, 1139, 1140, 1141, 1142, 1143, 1144, or 1145.

[0582] Table 11 provides exemplary nucleic acid sequences encoding V_{H} and V_{L} domains that, in combination, bind to SLC34A2. In some embodiments, the V_{H} and the V_{L} of the antibody or antigen-binding fragment that binds to SLC34A2 are each encoded by a sequence set forth in Table 11.

TABLE 11
SLC34A2 VH and VL Nucleic Acid Sequences

| Clone | VH Sequence | VL Sequence |
|---|---|---|
| SLC34A2 | CAAGTGCAACTGCAAGAGTCTGGACCCGGGC | GAAATCGTCCTGACACAGTCTCCAGATTTTCA |
| Ab 1 | TGGTGAAACCAAGCGAGACATTATCCCTCAC | GAGCGTGACGCCAAAGGAGAAAGTGACAATTA |
| | TTGTACCGTGTCAGGCGGTAGTGTGTCCTCC | CATGCCGGGCATCTCAGTCTGTTGGGTCTGGG |
| | GGGAATTTCTACTGGAGTTGGATACGCCAGC | TTGCATTGGTATCAGCAAAAGCCCGACCAGTC |
| | CTCCTGGGAAGGGCCTTGAATGGATTGGCTA | ACCCAAACTGCTCATCAAATATGCAAGCCAGA |
| | CATCTACTATTCAGGCTCCACCTACTACAAC | GTTTTTCAGGCGTACCTTCACGATTTAGCGGA |
| | CCGTCTTTGAAGTCAAGGGTTACGATAAGCG | AGTGGTTCTGGCACTGACTTCACCTTGACGAT |
| | TCGATACCTCCAAAAACCAATTCTCCCTAAA | TAATAGCCTGGAAGTAGAAGACGCTGCCACTT |
| | GCTCAGATCGTTAACTGCCGCTGATACCGCG | TCTACTGCCTGCAAAGTAGCTCCCTGCCCTGG |
| | GTGTACTATTGTGCCCGTTGGATGACCAAAG | ACTTTTGGGCAGGGTACTAAGGTCGAGATCAA |
| | TTAAGGGTTATTTCGACTATTGGGGACAAGG | G (SEQ ID NO: 1111) |
| | GACACTTGTCACCGTGTCCTCC (SEQ ID | |
| | NO: 1110) | |
| SLC34A2 | CAAGTGCAACTGCAAGAATCGGGACCCGGGC | GAGATAGTCCTGACCCAGTCACCCGATTTCCA |
| Ab 2 | TGGTTAAACCAAGTGAAACCCTTTCCCTCAC | GAGTGTTACTCCTAAGGAGAAAGTGACTATAA |
| | TTGTACCGTAAGCGGCGGTAGCGTGTCCTCT | CATGCCGGGCATCTCAGTCTGTCGGAAGCGGG |
| | GGTAGCTACTATTGGAGTTGGATTAGGCAGG | CTACATTGGTACCAGCAGAAGCCTGACCAGAG |
| | CGCCAGGGAAAGGCCTCGAATGGATTGGGTA | CCCGAAACTGCTCATCAAATATGCCTCCCAGT |
| | TATCTACTACAGCGGCAGTAACTACTACAAC | CGTTTTCTGGCGTGCCCTCTCGCTTTTCCGGA |
| | CCATCATTGAAGTCTAGAGTGACAATTAGTG | AGCGGATCTGGCACAGACTTCACCTTGACCAT |
| | TCGATACCTCTAAAAATCAATTCTCACTTAA | CAATAGCCTGGAAACTGAGGACGCCGCTACGT |
| | GCTGCGAGCTGTAACCGCCGCAGACACTGCG | ATTTCTGCCAGCAGTCCTCCAGTCTGCCTTGG |
| | GTGTACTATTGTGCCCGTTGGATGACCACTA | ACATTTGGTCAGGGAACGAAGGTGGAGATCAA |
| | TCAAGGGCTACTTCGATTATTGGGGACAAGG | G (SEQ ID NO: 1113) |
| | GACATTAGTTACGGTGTCCTCC (SEQ ID | |
| | NO: 1112) | |
| SLC34A2 | CAGGTCCAGCTCGTGGAGTCTGGCGGTGGGC | GATATTCAGATGACACAGAGCCCAAGTTCACT |
| Ab 3 | TGGTTCAGCCAGGGAGGAGTTTGCGGCTTTC | GTCAGCGAGTGTCGGAGATCGGGTTACTATAA |
| | CTGTACGGGAAGCGGATTCACCTTTGGTGAC | CCTGCCGAGCATCTCAGGATATCAATAATTAC |
| | TATGCCATGAACTGGGTCAGGCAGGCTCCTG | CTGGCCTGGTATCAGCAAAAACCCGGCAAAGT |
| | GAAAAGGCCTAGAGTGGGTGGGTTTCATCAG | CCCGAAGCTCCTGATATACGCAGCTTCAACAC |
| | AACCAAGCCATATGGCGGCACTACAGAATAT | TGCAAAGCGGTGTGCCCTCGCGCTTTAGCGGC |
| | GCAGCCAGCGTAAAAGGGAGATTCACGTTCA | TCTGGCAGCGGGACAGATTTCACCCTGACGAT |
| | GCCGCGACGACTCTAAGTCAATAGCTTACCT | TTCCTCCCTTCAACCCGAGGACGTGGCCACTT |
| | TCAGATGAACTCCCTCAAGACCGAAGACACC | ACTACTCCCTCAACTATTACTCTGTACCCTGG |
| | GCCGTGTACTATTGTACTATGATCCCTGTGC | ACCTTTGGCCAAGGGACAAAGGTGGAAATCAA |
| | TGCGTTTTTTAGAGTGGTTGCCTTGGGGACA | G (SEQ ID NO: 1115) |
| | AGGGACATTAGTTACTGTGTCCTCC (SEQ | |
| | ID NO: 1114) | |
| SLC34A2 | CAGGTCCAGCTCGTGGAGTCTGGCGGTGGGC | GCCATCCGGATGACACAGAGCCCAAGTTCACT |
| Ab 3.1 | TGGTTCAGCCAGGGAGGAGTTTGCGGCTTTC | GTCAGCGAGTGTCGGAGATCGGGTTACTATAA |
| | CTGTACGGGAAGCGGATTCACCTTTGGTGAC | CCTGCCGAGCATCTCAGGATATCAATAATTAC |
| | TATGCCATGAACTGGGTCAGGCAGGCTCCTG | CTGGCCTGGTATCAGCAAAAACCCGGCAAAGT |
| | GAAAAGGCCTAGAGTGGGTGGGTTTCATCAG | CCCGAAGCTCCTGATATACGCAGCTTCAACAC |
| | AACCAAGCCATATGGCGGCACTACAGAATAT | TGCAAAGCGGTGTGCCCTCGCGCTTTAGCGGC |
| | GCAGCCAGCGTAAAAGGGAGATTCACGTTCA | TCTGGCAGCGGGACAGATTTCACCCTGACGAT |
| | GCCGCGACGACTCTAAGTCAATAGCTTACCT | TTCCTCCCTTCAACCCGAGGACGTGGCCACTT |
| | TCAGATGAACTCCCTCAAGACCGAAGACACC | ACTACTCCCTCAACTATTACTCTGTACCCTGG |
| | GCCGTGTACTATTGTACTATGATCCCTGTGC | ACCTTTGGCCAAGGGACAAAGGTGGAAATCAA |
| | TGCGTTTTTTAGAGTGGTTGCCTTGGGGACA | G (SEQ ID NO: 999) |
| | AGGGACATTAGTTACTGTGTCCTCC (SEQ | |
| | ID NO: 1114) | |
| SLC34A2 | CAAGTGCAGCTGCTGGAATCTGGCGGCGGGC | GACATTCAGATGACTCAGTCACCTAGCTCACT |
| Ab 4 | TGGTGCAACCTGGAGGGAGCTTGCGGTTATC | GTCAGCGTCAGTCGGAGATCGGGTTACTATTA |
| | ATGCGCCGCCTCTGGCTTCACCTTCTCCTCC | CGTGTAGGGCTAGTCAGGGTATCAGCAATTAC |
| | TATGCCATGAATTGGGTTAGGCAGGCTCCTG | CTCGCCTGGTACCAGCAGAAACCCGGCAAAGT |
| | GGAAAGGTCTGGAGTGGGTAAGCGCTATTAG | CCCAAACCTGCTCATCTACACTGCAAGCACCC |
| | TGGTGGAGTGGGAAACACATATTATGCCGAT | TACAGAGCGGTGTTCCATCCCGTTTTTCTGGA |
| | TCTGTGAAGGGACGCTTTACAATCTCGAGAG | TCGGGATCTGGGACGGATTTCACCCTCACCAT |
| | ACAACAGCAAAAATACTCTGTACCTTCAAAT | ATCCTCCTTACAACCCGAGGACGTCGCAACTT |
| | GAACTCCCTCCGAGCCGAGGATACCGCAGTG | ATTACTGTCAGAAGTACAATAGTGCTCCCTTC |
| | TACTATTGCACAAAGGACGGGCCACTTTGGG | ACGTTTGGCCCGGGCACAAAGGTGGACATCAA |
| | GCAACTATTTTGATTACTGGGGCAGAGGAAC | G (SEQ ID NO: 1179) |
| | ATTGGTAACCGTGTCCTCC (SEQ ID | |
| | NO: 1178) | |
| SLC34A2 | CAGGTCCAACTACAGGAGTCGGGCCCTGGGC | GATATTCAAATGACTCAGAGTCCTTCTTCACT |
| Ab 5 | TGGTGAAGCCATCTGAAACCCTGTCACTCAC | GTCAGCCTCTGTTGGCGACCGGGTCACTATAA |
| | TTGCTCTGTTAGTGGTGGTTCAATCTCCTCC | CTTGTAGGGCTTCGCAGTCAATCTCCTCATAC |
| | AGCTCATATTACTGGGGCTGGATTAGACAGC | CTGAACTGGTACCAGCAGAAGCCCGGCAAAGC |
| | CACCCGGAAAAGGGTTAGAGTGGATAGGCAG | GCCGAAACTTTTGATATATGCAGCCAGTTCCT |
| | TATCGACTACAGCGGTAGCACCTATTACAAC | TACTGACCGGAGTACCTAGTCGCTTCACCGGC |
| | CCAAGCCTCAAGTCCCGAGTCACCATCAGTA | AGCGGGAGCGGGACAGACTTCACGCTCACGAT |
| | TCGATACAAGCAAGAATCAGTTCAGCCTGAG | TAGTTCCTTGCAGCCCGAGGACTTTGGAACCT |
| | GCTGTCCTCCGTGACAGCCGCTGAGAAAGCC | ATTACTGCCAACAGTCTTATAGCCCACCTCTT |
| | GTGTACTATTGTGCAAGACATGGCCGTGGGA | ACGTTTGGCGGCGGCACAAAGGTGGAAATCAA |
| | CTATTGGATATTTTGATTACTGGGGACAAGG | G (SEQ ID NO: 1181) |
| | GACACTCGTGACCGTGTCCTCC (SEQ ID | |
| | NO: 1180) | |
| SLC34A2 | CAGGTCCAGCTTCTGGAAAGCGGCGGCGGGC | GACATTCAGATGACCCAGTCTCCTAGTTCACT |
| Ab 6 | TGGTACAGCCAGGAGGCTCCTTGCGGTTATC | GTCAGCCTCTGTGGGCGACAGAGTGACCATTG |
| | ATGTGCCGCTAGTGGATTCACCTTTTCTAGC | CATGCAGGGCCTCTCAGGTTATTAGTAACTAC |
| | TCTGCAATGGCCTGGGTGCGCCAGGCACCGG | TTGGCTTGGTACCAGCAGAAACCTGGGAAGGT |
| | GAAAAGGTCTGGAGTGGGTCAGCGCAATATC | TCCCAAACTGCTGATATACGTAGCTTCGACTC |
| | AAGCTCTGGTGACAACACCTACTATGCCGAT | TACAGTCAGGCGTGCCATCCCGTTTTAGCGGA |
| | AGTGTCAAGGGAAGGTTCACCATCTCGAGAG | AGCGGTAGCGGCACTGATTTCACGCTCACCAT |
| | ACACATCTAAAAATACTCTTAGCCTTCAGAT | CTCCTCCCTGCAACCCGAGGATGTTGCCACGT |
| | GTCCTCCCTCCGAGCTGAGGACACAGCGATC | ATTATTGTCAAAACTACAATAGTGCGCCTTGG |
| | TACTATTGCGCTAAGCAAGGAACAAATTGGG | ACTTTCGGGCAAGGGACAAAGTTAGAGATCAA |
| | GACTCTACTTTGATTATTGGGGTCAGGGAAC | G (SEQ ID NO: 1183) |
| | ACTCGTGACTGTGTCCTCC (SEQ ID NO: | |
| | 1182) | |
| SLC34A2 | CAGGTCCAACTGCAAGAATCGGGCCCTGAGT | GAGATTGTCTTGACCCAGTCTCCCTCTTCACT |
| Ab 7 | TAGTTAAACCTAGCGAAACGTTGTCCATTAC | GTCGGCCTCTGTTGGGGACCGCGTAACCATTA |
| | ATGTACCGTGAGTGGTGGCTCTATCTCCTCC | CCTGCCGGGCCTCTCAGTCAATCAGTTCTTAC |
| | AGAAGTTATTATTGGGGCTGGATTAGACAGC | CTGAATTGGTACCAGCAGAAGCCAGGGCGGGC |
| | CACCTGGGAAAGGGCTCGAGTGGATCGGGTC | ACCCGAACTGCTGATCTACGCAGCCAGCAGCC |
| | CATATACTACGGAGGCAGCACCTACTATAAT | TGCAGTCTGGGGTGCCCTCGAGGTTTAGCGGC |
| | CCAAGTCTGAAGAGTCGAGTAACTATATCAG | TCAGGAAGCGGAACAGACTTCACACTCACAAT |
| | CGGATACGAGCAAGAACCAGTTTAGCCTTAA | CTCCTCCCTCCAACCCGAGGACTTCGCCACAT |
| | ACTTAACAGTGTGACCGCCGCTGATACTGCT | ACTATTGCCAGCAATCATTTTCCTCCCTAACC |
| | GTGTTCTATTGTGTCCGCCACCCGGCTGGAT | TTCGGCCAGGGTACTAGGCTCGAAATCAAG |
| | ATAGCACTCGTTGGAGTGCATTTGATATTTG | (SEQ ID NO: 1185) |
| | GGGACAAGGCACAATGGTGACTGTGTCCTCC | |
| | (SEQ ID NO: 1184) | |
| SLC34A2 | CAAGTGCAGCTCCAGGAGAGCGGGCCAGGGC | GAGATTGTGCTGACACAGAGCCCTTCTTCGCT |
| Ab 8 | TGGTGAAACCAAGTGAAACGCTGTCCCTGAC | GAGTGCCAGTGTCGGAGATCGGGTCACAATTA |
| | TTGCACGGTTAGCGGCGGCTCGATCTCCTCC | CCTGTAGGGCATCACAGTCAATCTCCTCCTAC |
| | AGATCATATTACTGGGGATGGATCCGACAGC | CTGAACTGGTACCAGTTGAAGCCTGGCAAGGC |
| | CTCCCGGCAAAGGGCCGGAGTGGATTGGAAG | TCCCAAACTTTTGATATACGCTGCTTCCAGCC |
| | TATCTACTATAGCGGGTCTACATTCTACAAT | TGCATAGCGGTGTGCCTTCACGCTTTTCTGGA |
| | CCCTCCCTAAAATCCAGAGTTACCATTAGTG | TCTGGTAGCGGGACAGACTTCACGCTCACCAT |
| | AGGACACCAGCAAATCACAGTTCAGCTTAAA | TAGTTCTTTACAACCCGCCGACTTCGCAACCT |
| | GGTCACTAGCGTTACTGCCGCAGATACCGCT | ATTATTGTCAACAGGCGTATATCTCTCTTACA |
| | GTGTACTATTGCGCCCGTCACCCAGCCGGAT | TTTGGCCAAGGGACCAGGCTCGAAATCAAG |
| | ACAGTTCTTCTTGGTCTGCCTTTGATATATG | (SEQ ID NO: 1187) |
| | GGGTCAGGGAACTATGGTAACAGTGTCCTCC | |
| | (SEQ ID NO: 1186) | |
| SLC34A2 | CAGGTACAGCTGGTCGAATCCGGTGGCGGAT | GATATTCAGATGACACAGAGCCCTAGCTCCCT |
| Ab 9 | TGGTACAGCCAGGAAGGAGTTTACGGCTTTC | TTCCGCTTTTGTCGGCGACCGGGTGACTATTA |
| | CTGTAGTGGATCTGGTTTTACGAGCGGTGAT | CTTGCAGGGCCTCGCAGGACATAGGCAATTAC |
| | TATGCAGTGTCCTGGGTTAGACAGGCACCCG | CTGGCCTGGTATCAACAGACGCCTGAAAAAGT |
| | GGAAAGGCCTAGAGTGGGTTGGCTTCATCAG | CCCGAAACTGCTGATCTACGCTGCCTCGACTC |
| | AACCAAGCCTTACGGAGAAACCACAGAGTAC | TCCAGTCAGGCGTGCCCTCTCGCTTTTCTGGG |
| | GCTGCCAGTGTGAAAGGCCGATTCACCATTA | TCTGGATCAGGGACAGATTTCACTCTGACCAT |
| | GCCGCGACGACAGCAAGAGTATCGCCTATCT | CTCATCACTGCAACCAGAGGATGTCGCAACCT |
| | CCAGATGAACTCTCTCAAAGCTGAAGACACA | ATTACTGCCAAAACTACTATTCAGTTCCCTGG |
| | GCGGTGTTCTACTGTACCTTCATACCCGTCA | ACCTTTGGCCAAGGGACAAAGGTGGAGATCAA |
| | GCCGTTTTTTAGAGTGGTTGCCGTGGGGACA | G (SEQ ID NO: 1189) |
| | AGGGATTCCTGTGACTGTGTCCTCC (SEQ | |
| | ID NO: 1188) | |
| SLC34A2 | CAAGTGCAGCTCCTAGAGTCGGGCGGTGGGT | GATATTCAGATGACTCAGTCTCCTTCGTCACT |
| Ab 10 | TGGTTCAACCTGGAGCCAGCCTTCGGTTATC | GTCAGCGAGCGTAGGCGACCGGGTCACTATTA |
| | CTGTGCCGCAAGTGGTTTCACCTTTTCTACC | CTTGCAGGGCCTCTCAAGGAATCAGTAATTAC |
| | TACGCCATGACCTGGGTCAGGCAGGCACCTG | CTGGCTTGGTACCAGCAGCGCCCAGGGAAAGT |
| | GCAAAGGTTTAGAGTGGGTGAGTGGGATTAA | TCCAAAGCTGCTGATCTACGCCGCATCAACAC |
| | CGGCGGAGGTGACACCACCTATTATGCAGAT | TGAGATCAGGCGTGCCCTCTAGATTTAGCGGG |
| | AGTGTTAAAGGGCGATTCACCATATCCCGCG | TCAGGGTCTGGGACAGACTTCACCCTCACTAT |
| | ACAATTCCAAGAACACGCTTTACCTACAGAT | CAGCTCCCTCCAGCCCGAGGACGTGGCGACCT |
| | GAACAGCTTGAGGGCCGAAGATACGGCTGTC | ATTATTGCCAGAAGTACAATTCCGCTCCGCTG |
| | TACTATTGTGCTGTCCGTGGCTATACTTACG | ACATTTGGCGGAGGCACAAAGGTGGAAATCAA |
| | GCTATTTTTTCGATTACTGGGGACAAGGAAC | G (SEQ ID NO: 1191) |
| | GCTCGTGACAGTGTCCTCC (SEQ ID NO: | |
| | 1190) | |
| SLC34A2 | CAGGTTCAGTTGCAGGAATCGGGCCCAGGCC | GAGATCGTCCTGACACAGAGTCCCTCATCACT |
| Ab 11 | TGGTCAAACCGAGTGAAACGCTGTCCTTAAC | GAGTGCCTCTGTTGGGGATCGGCTAACCATTA |
| | CTGCACCGTATCTGGAGGCAGCATCTCCTCA | CATGTAGAGCCTCCCAGACCATCTCATCATAT |
| | AGCTCTTATTACTGGGGCTGGATTAGGCAGC | CTTAATTGGTATCAGCAAAAACCCGGGAAGGC |
| | CACCCGGCAAAGGCCTGGAGTGGATTGGTTC | ACCTAAAGTGCTGATCTACGCAGCATCCTCTC |
| | CTTGTACTACAGCGGGAGCACCTATTACAAC | TTCAGAGCGGCGTCCCATCTCGCTTTAGCGGT |
| | CCAAGCCTGAAGTCCCGAGTAACCATTAGTG | TCTGGGTCTGGGACTGACTTCACTCTCACTAT |
| | TGGACACTTCCAAGAACCAATTCAGTCTGAA | CTCATCATTGCAACCTGAGGACTTCGCTACAT |
| | GCTCAACTCTGTGACCGCTGCGGATACTGCC | ACTATTGCCAGCAGTCCTTCATCATACCTTAC |
| | GTGTACTATTGCACGAGGCACCCTAGAGGAA | ACGTTTGGACAAGGCACAAAGCTCGAGATAAA |
| | TTGCCGCTCGTTGGGGAAATTGGTTTGATCC | G (SEQ ID NO: 1193) |
| | CTGGGGTCAGGGTACACTCGTGACAGTGTCC | |
| | TCC (SEQ ID NO: 1192) | |
| SLC34A2 | CAAGTGCAACTGCAAGAATCAGGGCCTGGTT | GAAATTGTACTCACACAGAGTCCATCTTCCCT |
| Ab 12 | TGGTCAAGCCATCTGAGACACTTTCCTTAAC | TTCCGCAAGTGTCGGAGACAGAGTTACTATTA |
| | TTGTACGGTATCTGGTGGGTCAATCTCCTCC | CTTGCAGGGCCTCTCAGAGCATCTCTAGTTAC |
| | TCATCATATTACCGCGGGTGGATTAGGCAGC | CTGAACTGGTACCAGCAGAAACCGGGCAAAGC |
| | CACCCGGCAAAGGACTGGAGTGGATTGGAAG | ACCCAAGCTCCTAATCTACGCTGCCAGCTCTC |
| | TATATACTATTCCGGCTCAACGTACTACAAC | TGCAGTCTGGTGTGCCTAGTCGTTTTTCAGGA |
| | CCAAGCCTGAAGAGTCGGGTCACTATAAGTG | AGCGGCTCCGGAACAGATTTCACCCTCACCAT |
| | TGGACACTAGCAAGAATCAATTTTCCCTGAA | CAGCTCGTTACAGCCGGAGGACTTCGCCACCT |
| | ACTCTCGAGCGTTACCGCAGCCGATACCGCG | ATTACTGCCAGCAGAGCTATTCTACACCCTTC |
| | GTGTACTATTGTGCTAGACACCCTCGAGGGA | ACCTTTGGACCCGGCACAAAAGTGGATATCAA |
| | GCTATGGCGCTAATTTCGACTATTGGGGTCA | G (SEQ ID NO: 1195) |
| | GGGAACATTGGTTACTGTGTCCTCC (SEQ | |
| | ID NO: 1194) | |
| SLC34A2 | CAGGTTCAGTTAGTTGAGTCTGGTGGCGGGC | GACATTCAGATGACCCAATCTCCTTCTTCTCT |
| Ab 13 | TTGTCCAACCCGGTAGGAGCTTGCGGCTGAG | GAGTGCTTCGGTTGGGGATCGGGTCACTGTCA |
| | TTGCATAGGGAGTGGGTTCACGTTTGGGGAA | CCTGTCGCGCTAACCAGGACATTAACAATTAC |
| | TATGCCATGAGTTGGGTGAGGCAGGCACCTG | CTGGCTTGGTACCAGCAGACACCCGGCAAAGT |
| | GCAAAGGGCTAGAGTGGGTGGGGTTCATCAG | ACCAAAACTCCTTATTTACGCCGCAAGCACTC |
| | AACCAAGCCATACGGTGGCACCACTGAATTT | TGCAGAGCGGAGTACCAAGTCGATTCAGCGGA |
| | GCGGCAAGCGTGAAGGGAAGATTCACGATGT | TCAGGCTCTGGGACTGATTTCACACTGACCAT |
| | CCCGCGATGACTCCAAATCAATCGCCTATCT | CTCCTCACTGCAACCTGAGGACGTCGCCACGT |
| | CGAGATGAACTCCCTCAAGACCGAGGACACT | ACTATTGCCAGAATTATTACAGCGTGCCCTGG |
| | GCGGTGTACTATTGTACACTCATACCCGCCC | ACCTTTGGTCAGGGAACAAAGCTGGAAATCAA |
| | TTCGTTTTCTGGAGTGGTTGCCCTGGGGACA | G (SEQ ID NO: 1197) |
| | AGGCACATTGGTGACAGTGTCCTCC (SEQ | |
| | ID NO: 1196) | |
| SLC34A2 | CAAGTGCAACTGCAAGAGAGCGGACCAGGGC | GAGATCGTTCTGACCCAGTCACCTGATTTCCA |
| Ab 14 | TGGTGAAACCCTCTGAGACCCTTTCCCTGAC | GAGCGTAACACCTAAAGAATCTGTGACTATAA |
| | CTGTACGGTTTCAGGAGGGTCCGTGTCCTCC | CTTGTCGGGCAAGCCAGTCTGTCGGATCAGGC |
| | GGTAGTTATTACTGGTCATGGATTAGACAGC | CTCCACTGGTACCAGCAGAAGCCCGACCAGAG |
| | CTCCGGGTAAAGGGTTAGAGTGGATTGGCTA | TCCCAAGCTCCTAATCAAATATGCCAGTCAGA |
| | CATATTCTACTCCGGGTCTACGTACTATAAC | GCTTCTCAGGAGTCCCAAGTCGATTTTCAGGG |
| | CCTAGTTTGAAGTCGCGCGTTACCATTAGCG | AGTGGCAGCGGAACAGATTTCACATTGACAAT |
| | TGGACACTAGCAAGAACCAATTCTCCCTTAA | CAATTCCCTGGAAGCCGAGGACGCGGCCACAT |
| | GCTCACCAGTGTGACAGCCGCAGACACCGCT | ATTATTGCCTCCAATCTAGCAGCCTGCCCTGG |
| | GTCTACTTTTGCGCTAGGTGGATGACCACTG | ACTTTTGGGCAAGGCACGAAGGTGGAAATCAA |
| | TCAAAGGCTACTTTGATTATTGGGGTCAGGG | G (SEQ ID NO: 1199) |
| | AACCCTGGTAACTGTCTCCTCC (SEQ ID | |
| | NO: 1198) | |
| SLC34A2 | CAGGTTCAGTTGCAGGAAAGCGGGCCCGGGC | GATATTCAGATGACCCAAAGCCCTAGTTCCCT |
| Ab 15 | TGGTCAAACCATCAGAAACCTTGTCCTTAAC | GTCCGCAAGTGTTGGGGACCGGGTGACTATTA |
| | CTGTACCGTAAGCGGCGGAAGTGTGTCCTCC | CATGCCGAGCTTCTCAAAGCATCAGCTCATAC |
| | GCTTCATATTATTGGTCGTGGATAAGGCAGC | CTGAACTGGTACCAGCAGAAACCCGGCAAGGC |
| | CACCCGGAAAAGGGCTCGAGTACATTGGATA | ACCTAAGTTCCTGATTAGCCCAGCCTCTAGCC |
| | CATCTACTATTCAGGATCTACTTACTACAAC | TGCAGTCTGGCGTACCCAGTCGCTTTTCTGGG |
| | CCAAGCCTGAAGTCAAGAGTGACCATCTCCA | TCCGGCTCTGGCACGGATTTCACGCTAACAAT |
| | TTGATACCTCCAAGAATCAGTTCAGTCTTAA | CAGCTCGCTTCAGCCGGAGGACTTTGCCACTT |
| | TCTCAGGAGTGTCACTGCTGCCGACACAGCG | ATTATTGCCAGCAATCATATAGCATACCTTGG |
| | GTGTACTATTGCGCCAGATACATCGTCGGTC | ACATTTGGCCAAGGGACAAAGGTGGAAATCAA |
| | GTCCCGGCTTCAACTGGTTTGACCCGTGGGG | G (SEQ ID NO: 1201) |
| | TCAGGGTACACTCGTGACTGTGTCCTCC | |
| | (SEQ ID NO: 1200) | |
| SLC34A2 | CAAGTGCAGCTCCAAGAATCAGGGCCCGGGT | GATATTCAGATGACTCAGAGTCCCTCATCCCT |
| Ab 16 | TGGTTAAACCAAGTGAAACCCTTTCCCTGAC | TTCCGCTTCTGTCGGCGACCGCGTTACAATCA |
| | TTGCACCGTTAGCGGAGATTCTGTGTCCTCC | CCTGTAGGGCCTCGCAGACAATCAGTTCGTAC |
| | GTGTCCTATTACTGGAGCTGGATACGACAGC | CTGAACTGGTATCAACAGAAACCTGGGAAGGC |
| | CACCTGGCAAGGGACTGGAGTGGATTGGCTA | TCCTAAACTCCTCATAAGTCCTGCCTCAAATT |
| | CATCTGGTACAGCGGCAGCACCTATTACAAC | TACAGTCTGGGGTCCCAAGCAGATTTTCTGGA |
| | CCAAGTCTAAAGTCTCGGGTGACAATTTCCA | TCAGGGTCTGGGACGGATTTCACCCTGACTAT |
| | TTGACACTTCAAAGAATCAGTTCAGCCTGAA | CAGCTCGCTGCAGCCGGAGGACTTTGCCACGT |
| | GTTAAGGAGTGTGACCGCAGCCGACACTGCG | ATTATTGCCAGCAATCATACATCATTCCCTGG |
| | GTGTACTATTGTGCAAGATACATCGTAGGCC | ACCTTTGGCCAGGGAACAAAGGTCGAGATCAA |
| | GTCCCGGTTTCAACTGGTTCGATCCCTGGGG | G (SEQ ID NO: 1203) |
| | TCAGGGAACATTGGTGACAGTATCCTCC | |
| | (SEQ ID NO: 1202) | |

[0583] In some embodiments, the V_{H} of the antibody or antigen-binding fragment that binds to SLC34A2 is encoded by a nucleic acid comprising a sequence at least 80%, at least 85%, at least 90%, at least 91%, at least 92%, at least 93%, at least 94%, at least 95%, at least 96%, at least 97%, at least 98%, at least 99%, at least 99.5% or 100% identical to the sequence set forth in SEQ ID NOs: 1110, 1112, 1114, 1178, 1180, 1182, 1184, 1186, 1188, 1190, 1192, 1194, 1196, 1198, 1200, or 1202, optionally, wherein the V_{H} CDRs are identical to those encoded by SEQ ID NOs: 1110, 1112, 1114, 1178, 1180, 1182, 1184, 1186, 1188, 1190, 1192, 1194, 1196, 1198, 1200, or 1202, respectively. In some embodiments the V_{L} of the antibody or antigen-binding fragment that binds to SLC34A2 is encoded by a nucleic acid comprising a sequence at least 80%, at least 85%, at least 90%, at least 91%, at least 92%, at least 93%, at least 94%, at least 95%, at least 96%, at least 97%, at least 98%, at least 99%, at least 99.5% or 100% identical to the sequence set forth in SEQ ID NO: 999, 1111, 1113, 1115, 1179, 1181, 1183, 1185, 1197, 1189, 1191, 1193, 1195, 1197, 1199, 1201, or 1203, optionally, wherein the V_{L} CDRs are identical to those encoded by SEQ ID NOs: 999, 1111, 1113, 1115, 1179, 1181, 1183, 1185, 1197, 1189, 1191, 1193, 1195, 1197, 1199, 1201, or 1203, respectively.

[0584] Table 12 provides exemplary nucleic acid sequences encoding scFvs that bind to SLC34A2. In some embodiments, the antibody or antigen-binding fragment that binds to SLC34A2 comprises an scFv encoded by a nucleic acid sequence at least 80%, at least 85%, at least 90%, at least 91%, at least 92%, at least 93%, at least 94%, at least 95%, at least 96%, at least 97%, at least 98%, at least 99%, at least 99.5% or 100% identical to a nucleic acid sequence set forth in Table 12, and optionally comprising V_{H} and V_{L} CDR sequences that are 100% identical to those thereof.

TABLE 12
SLC34A2 scFv Nucleotide Sequences

| Clone | scFv Sequence |
|---|---|
| SLC34A2 | GAAATCGTCCTGACACAGTCTCCAGATTTTCAGAGCGTGACGCCAAAGGAGAAAGTGACAATTACAT |
| Ab 1 scFv | GCCGGGCATCTCAGTCTGTTGGGTCTGGGTTGCATTGGTATCAGCAAAAGCCCGACCAGTCACCCAA |
| (VL-VH) | ACTGCTCATCAAATATGCAAGCCAGAGTTTTTCAGGCGTACCTTCACGATTTAGCGGAAGTGGTTCT |
| (SEQ ID | GGCACTGACTTCACCTTGACGATTAATAGCCTGGAAGTAGAAGACGCTGCCACTTTCTACTGCCTGC |
| NO: 1116 | AAAGTAGCTCCCTGCCCTGGACTTTTGGGCAGGGTACTAAGGTCGAGATCAAGGGCTCGACAAGCGG |
| | AAGTGGCAAACCGGGCAGCGGCGAGGGAAGCACCAAGGGACAAGTGCAACTGCAAGAGTCTGGACCC |
| | GGGCTGGTGAAACCAAGCGAGACATTATCCCTCACTTGTACCGTGTCAGGCGGTAGTGTGTCCTCCG |
| | GGAATTTCTACTGGAGTTGGATACGCCAGCCTCCTGGGAAGGGCCTTGAATGGATTGGCTACATCTA |
| | CTATTCAGGCTCCACCTACTACAACCCGTCTTTGAAGTCAAGGGTTACGATAAGCGTCGATACCTCC |
| | AAAAACCAATTCTCCCTAAAGCTCAGATCGTTAACTGCCGCTGATACCGCGGTGTACTATTGTGCCC |
| | GTTGGATGACCAAAGTTAAGGGTTATTTCGACTATTGGGGACAAGGGACACTTGTCACCGTGTCCTC |
| | C |
| SLC34A2 | CAGGTTCAACTGCAAGAGTCTGGGCCCGGATTGGTGAAGCCAAGTGAAACCCTTTCCCTGACTTGTA |
| Ab 1 scFv | CGGTATCCGGCGGTTCGGTGTCCTCCGGGAATTTCTACTGGTCATGGATTAGACAGCCACCTGGTAA |
| (VH-VL) | AGGGCTGGAATGGATTGGGTACATCTACTACTCTGGAAGCACTTACTATAACCCATCTCTTAAAAGT |
| SEQ ID | AGAGTCACCATAAGTGTGGACACAAGCAAGAACCAGTTCAGCCTGAAGCTGCGTTCTTTAACCGCCG |
| NO: 1209 | CGGACACAGCCGTGTATTACTGCGCTAGGTGGATGACCAAAGTAAAGGGCTATTTCGATTATTGGGG |
| | ACAAGGGACATTGGTCACAGTGTCCTCCGGCTCAACTAGCGGTAGTGGTAAACCTGGCAGCGGCGAG |
| | GGAAGTACGAAAGGCGAGATAGTCCTGACTCAGTCTCCAGATTTTCAGTCGGTGACGCCTAAGGAGA |
| | AGGTTACTATTACCTGCCGAGCATCACAGTCTGTGGGCAGCGGGCTCCACTGGTATCAACAGAAACC |
| | GGATCAGAGCCCTAAGCTCCTCATCAAATATGCCAGTCAGTCATTTTCTGGAGTGCCCTCCCGGTTT |
| | TCCGGCAGCGGCTCAGGAACCGACTTCACCCTGACAATCAATAGCCTCGAGGTCGAAGACGCAGCCA |
| | CCTTCTACTGTCTACAGTCTTCATCCTTACCCTGGACTTTTGGACAAGGGACAAAGGTTGAAATCAA |
| | G |
| SLC34A2 | GAGATAGTCCTGACCCAGTCACCCGATTTCCAGAGTGTTACTCCTAAGGAGAAAGTGACTATAACAT |
| Ab 2 scFv | GCCGGGCATCTCAGTCTGTCGGAAGCGGGCTACATTGGTACCAGCAGAAGCCTGACCAGAGCCCGAA |
| (VL-VH) | ACTGCTCATCAAATATGCCTCCCAGTCGTTTTCTGGCGTGCCCTCTCGCTTTTCCGGAAGCGGATCT |
| SEQ ID | GGCACAGACTTCACCTTGACCATCAATAGCCTGGAAACTGAGGACGCCGCTACGTATTTCTGCCAGC |
| NO: 1117 | AGTCCTCCAGTCTGCCTTGGACATTTGGTCAGGGAACGAAGGTGGAGATCAAGGGTTCAACATCAGG |
| | GAGCGGGAAACCGGGCTCTGGCGAGGGCTCAACAAAGGGACAAGTGCAACTGCAAGAATCGGGACCC |
| | GGGCTGGTTAAACCAAGTGAAACCCTTTCCCTCACTTGTACCGTAAGCGGCGGTAGCGTGTCCTCTG |
| | GTAGCTACTATTGGAGTTGGATTAGGCAGGCGCCAGGGAAAGGCCTCGAATGGATTGGGTATATCTA |
| | CTACAGCGGCAGTAACTACTACAACCCATCATTGAAGTCTAGAGTGACAATTAGTGTCGATACCTCT |
| | AAAAATCAATTCTCACTTAAGCTGCGAGCTGTAACCGCCGCAGACACTGCGGTGTACTATTGTGCCC |
| | GTTGGATGACCACTATCAAGGGCTACTTCGATTATTGGGGACAAGGGACATTAGTTACGGTGTCCTC |
| | C |
| SLC34A2 | CAGGTCCAACTGCAAGAATCGGGACCCGGGCTGGTTAAGCCTTCCGAAACGTTGAGTCTGACCTGTA |
| Ab 2 scFv | CCGTATCTGGAGGCTCGGTGTCCTCCGGCAGTTATTATTGGAGCTGGATTCGGCAGGCACCAGGGAA |
| (VH-VL) | AGGGCTGGAATGGATTGGATACATCTACTACTCAGGATCAAACTACTATAATCCATCCCTGAAGAGT |
| SEQ ID | AGGGTCACAATCAGTGTGGACACCAGCAAAAACCAATTCTCCTTGAAACTTAGAGCCGTCACTGCGG |
| NO: 1210 | CAGATACCGCTGTGTACTATTGCGCGCGTTGGATGACTACCATCAAAGGCTACTTCGATTACTGGGG |
| | TCAGGGTACACTCGTTACCGTGTCCTCCGGAAGCACATCTGGTTCTGGGAAACCTGGCTCTGGCGAG |
| | GGTTCAACGAAGGGCGAAATAGTATTAACGCAGTCTCCAGACTTTCAGTCAGTGACACCTAAGGAGA |
| | AAGTTACTATAACCTGCCGAGCCTCACAATCTGTGGGAAGTGGCCTACATTGGTATCAGCAAAAGCC |
| | CGACCAGAGCCCAAAGCTCCTCATCAAATATGCTTCACAGAGCTTCAGCGGTGTGCCCTCTCGCTTC |
| | TCCGGGTCTGGCTCCGGCACTGACTTTACACTGACTATTAATAGCCTTGAGACCGAGGATGCCGCAA |
| | CCTACTTTTGTCAACAAAGCAGCAGCTTACCGTGGACATTTGGACAAGGGACAAAGGTCGAGATCAA |
| | G |
| SLC34A2 | GATATTCAGATGACACAGAGCCCAAGTTCACTGTCAGCGAGTGTCGGAGATCGGGTTACTATAACCT |
| Ab 3 scFv | GCCGAGCATCTCAGGATATCAATAATTACCTGGCCTGGTATCAGCAAAAACCCGGCAAAGTCCCGAA |
| (VL-VH) | GCTCCTGATATACGCAGCTTCAACACTGCAAAGCGGTGTGCCCTCGCGCTTTAGCGGCTCTGGCAGC |
| SEQ ID | GGGACAGATTTCACCCTGACGATTTCCTCCCTTCAACCCGAGGACGTGGCCACTTACTACTCCCTCA |
| NO: 1118 | ACTATTACTCTGTACCCTGGACCTTTGGCCAAGGGACAAAGGTGGAAATCAAGGGCTCTACTAGCGG |
| | TTCAGGGAAACCTGGGAGTGGAGAGGGCTCGACCAAGGGACAGGTCCAGCTCGTGGAGTCTGGCGGT |
| | GGGCTGGTTCAGCCAGGGAGGAGTTTGCGGCTTTCCTGTACGGGAAGCGGATTCACCTTTGGTGACT |
| | ATGCCATGAACTGGGTCAGGCAGGCTCCTGGAAAAGGCCTAGAGTGGGTGGGTTTCATCAGAACCAA |
| | GCCATATGGCGGCACTACAGAATATGCAGCCAGCGTAAAAGGGAGATTCACGTTCAGCCGCGACGAC |
| | TCTAAGTCAATAGCTTACCTTCAGATGAACTCCCTCAAGACCGAAGACACCGCCGTGTACTATTGTA |
| | CTATGATCCCTGTGCTGCGTTTTTTAGAGTGGTTGCCTTGGGGACAAGGGACATTAGTTACTGTGTC |
| | CTCC |
| SLC34A2 | CAAGTGCAGCTGGTCGAATCTGGAGGCGGCCTGGTCCAGCCCGGAAGGAGCTTGCGACTGTCATGCA |
| Ab 3 scFv | CCGGTTCCGGGTTCACGTTTGGGGATTATGCCATGAACTGGGTCAGGCAGGCTCCTGGAAAGGGACT |
| (VH-VL) | GGAGTGGGTGGGGTTCATCAGAACCAAGCCCTATGGTGGAACTACCGAATATGCCGCCTCTGTTAAA |
| SEQ ID | GGAAGATTCACCTTTAGCCGCGATGACTCCAAAAGCATCGCATACCTCCAGATGAACTCACTCAAAA |
| NO: 1211 | CAGAGGACACCGCGGTGTATTACTGCACAATGATCCCAGTCCTGCGGTTCCTTGAGTGGCTGCCGTG |
| | GGGACAAGGCACACTCGTGACAGTGTCCTCCGGTTCTACTAGCGGAAGTGGCAAACCGGGTTCTGGG |
| | GAGGGCTCGACCAAGGGCGATATTCAGATGACTCAGAGTCCCTCATCCCTATCAGCAAGTGTTGGGG |
| | ACCGCGTGACCATTACATGTCGGGCCTCCCAGGACATCAATAATTACCTAGCTTGGTATCAACAGAA |
| | GCCTGGCAAAGTACCAAAACTCTTGATATACGCCGCTTCGACTCTTCAGAGCGGTGTCCCTAGTCGT |
| | TTTTCAGGCAGCGGCTCTGGCACTGATTTCACGTTAACAATATCCAGCTTACAGCCAGAGGACGTAG |
| | CAACTTACTATTCTCTGAACTACTACAGCGTTCCCTGGACCTTTGGGCAAGGGACAAAGGTGGAAAT |
| | TAAG |
| SLC34A2 | GATATTCAGATGACTCAATCGCCCTCTTCCCTGAGCGCCAGTGTCGGAGATCGAGTAACCATCACTT |
| Ab 4 scFv | GTAGGGCTAGTCAAGGAATCTCTAACTATCTGGCCTGGTACCAGCAGAAGCCTGGGAAAGTTCCGAA |
| (VL-VH) | CCTTCTCATCTACACAGCAAGCACCCTCCAGTCTGGGGTTCCTAGTAGGTTTTCAGGGTCTGGCAGC |
| SEQ ID | GGTACTGACTTCACGCTGACTATTTCATCCTTGCAACCCGAGGATGTTGCAACTTATTATTGCCAGA |
| NO: 1212 | AGTACAATAGCGCTCCATTCACCTTTGGCCCAGGGACAAAGGTGGACATCAAGGGCTCGACATCTGG |
| | TAGCGGCAAACCTGGCTCTGGCGAGGGAAGTACCAAGGGACAGGTCCAGCTGCTGGAAAGCGGTGGT |
| | GGGCTGGTCCAACCTGGAGGATCATTGCGGCTGTCCTGCGCCGCCAGTGGGTTCACCTTTAGCTCCT |
| | ACGCCATGAATTGGGTGCGCCAGGCTCCCGGCAAAGGCCTAGAGTGGGTGTCTGCCATTAGCGGCGG |
| | AGTCGGGAATACCTACTATGCGGACAGCGTGAAAGGGCGGTTTACAATATCACGCGACAACTCCAAA |
| | AACACCTTATACTTACAGATGAACTCACTTAGAGCTGAAGATACCGCAGTGTACTATTGTACGAAGG |
| | ACGGTCCACTCTGGGGCAATTATTTCGATTACTGGGGACGTGGCACACTCGTGACAGTGTCCTCC |
| SLC34A2 | CAAGTGCAGCTGCTGGAATCTGGCGGCGGGCTGGTGCAACCTGGAGGGAGCTTGCGGTTATCATGCG |
| Ab 4 scFv | CCGCCTCTGGCTTCACCTTCTCCTCCTATGCCATGAATTGGGTTAGGCAGGCTCCTGGGAAAGGTCT |
| (VH-VL) | GGAGTGGGTAAGCGCTATTAGTGGTGGAGTGGGAAACACATATTATGCCGATTCTGTGAAGGGACGC |
| SEQ ID | TTTACAATCTCGAGAGACAACAGCAAAAATACTCTGTACCTTCAAATGAACTCCCTCCGAGCCGAGG |
| NO: 1213 | ATACCGCAGTGTACTATTGCACAAAGGACGGGCCACTTTGGGGCAACTATTTTGATTACTGGGGCAG |
| | AGGAACATTGGTAACCGTGTCCTCCGGGAGTACATCTGGCAGCGGGAAACCCGGCTCTGGGGAAGGT |
| | TCAACCAAGGGCGACATTCAGATGACTCAGTCACCTAGCTCACTGTCAGCGTCAGTCGGAGATCGGG |
| | TTACTATTACGTGTAGGGCTAGTCAGGGTATCAGCAATTACCTCGCCTGGTACCAGCAGAAACCCGG |
| | CAAAGTCCCAAACCTGCTCATCTACACTGCAAGCACCCTACAGAGCGGTGTTCCATCCCGTTTTTCT |
| | GGATCGGGATCTGGGACGGATTTCACCCTCACCATATCCTCCTTACAACCCGAGGACGTCGCAACTT |
| | ATTACTGTCAGAAGTACAATAGTGCTCCCTTCACGTTTGGCCCGGGCACAAAGGTGGACATCAAG |
| SLC34A2 | GATATTCAAATGACTCAGAGTCCTTCTTCACTGTCAGCCTCTGTTGGCGACCGGGTCACTATAACTT |
| Ab 5 scFv | GTAGGGCTTCGCAGTCAATCTCCTCATACCTGAACTGGTACCAGCAGAAGCCCGGCAAAGCGCCGAA |
| (VL-VH) | ACTTTTGATATATGCAGCCAGTTCCTTACTGACCGGAGTACCTAGTCGCTTCACCGGCAGCGGGAGC |
| SEQ ID | GGGACAGACTTCACGCTCACGATTAGTTCCTTGCAGCCCGAGGACTTTGGAACCTATTACTGCCAAC |
| NO: 1214 | AGTCTTATAGCCCACCTCTTACGTTTGGCGGCGGCACAAAGGTGGAAATCAAGGGTTCTACAAGCGG |
| | ATCTGGGAAACCCGGGAGCGGAGAAGGTTCTACCAAGGGACAGGTCCAACTACAGGAGTCGGGCCCT |
| | GGGCTGGTGAAGCCATCTGAAACCCTGTCACTCACTTGCTCTGTTAGTGGTGGTTCAATCTCCTCCA |
| | GCTCATATTACTGGGGCTGGATTAGACAGCCACCCGGAAAAGGGTTAGAGTGGATAGGCAGTATCGA |
| | CTACAGCGGTAGCACCTATTACAACCCAAGCCTCAAGTCCCGAGTCACCATCAGTATCGATACAAGC |
| | AAGAATCAGTTCAGCCTGAGGCTGTCCTCCGTGACAGCCGCTGAGAAAGCCGTGTACTATTGTGCAA |
| | GACATGGCCGTGGGACTATTGGATATTTTGATTACTGGGGACAAGGGACACTCGTGACCGTGTCCTC |
| | C |
| SLC34A2 | GATATACAGATGACTCAGTCGCCCAGCTCATTGAGTGCGAGTGTCGGAGATCGCGTGACCATTGCGT |
| Ab 6 scFv | GCAGGGCTTCACAAGTGATTAGCAATTACCTGGCCTGGTATCAGCAAAAACCGGGCAAGGTGCCTAA |
| (VL-VH) | GCTGCTGATATACGTCGCCTCGACTCTCCAGAGTGGCGTGCCTTCTAGATTTTCAGGGAGTGGCAGC |
| SEQ ID | GGAACCGATTTCACCCTGACCATCTCATCACTGCAACCAGAGGACGTAGCCACCTATTACTGCCAGA |
| NO: 1216 | ATTATAACAGCGCACCCTGGACATTTGGGCAGGGTACAAAGCTGGAAATCAAGGGTTCTACATCTGG |
| | GTCTGGGAAACCTGGGTCTGGGGAGGGCTCCACCAAGGGACAGGTTCAGCTTCTTGAAAGTGGCGGC |
| | GGATTAGTGCAGCCAGGAGGTTCTTTGCGGCTTTCATGTGCAGCCAGTGGCTTCACCTTCTCCTCCT |
| | CTGCTATGGCCTGGGTTCGACAGGCTCCCGGAAAAGGGCTAGAGTGGGTTAGCGCTATCTCCTCCTC |
| | TGGCGATAATACTTACTACGCCGACAGCGTAAAAGGCAGGTTCACGATTAGCAGAGACACTAGCAAA |
| | AACACGCTCAGCCTCCAGATGTCCTCCCTGCGTGCCGAGGACACTGCAATCTACTATTGTGCAAAGC |
| | AGGGAACAAACTGGGGCTTATACTTTGACTATTGGGGTCAAGGAACATTGGTCACAGTGTCCTCC |
| SLC34A2 | CAGGTCCAGCTTCTGGAAAGCGGCGGCGGGCTGGTACAGCCAGGAGGCTCCTTGCGGTTATCATGTG |
| Ab 6 scFv | CCGCTAGTGGATTCACCTTTTCTAGCTCTGCAATGGCCTGGGTGCGCCAGGCACCGGGAAAAGGTCT |
| (VH-VL) | GGAGTGGGTCAGCGCAATATCAAGCTCTGGTGACAACACCTACTATGCCGATAGTGTCAAGGGAAGG |
| SEQ ID | TTCACCATCTCGAGAGACACATCTAAAAATACTCTTAGCCTTCAGATGTCCTCCCTCCGAGCTGAGG |
| NO: 1217 | ACACAGCGATCTACTATTGCGCTAAGCAAGGAACAAATTGGGGACTCTACTTTGATTATTGGGGTCA |
| | GGGAACACTCGTGACTGTGTCCTCCGGCTCAACATCTGGGAGTGGCAAACCCGGGAGCGGCGAAGGG |
| | AGCACCAAGGGCGACATTCAGATGACCCAGTCTCCTAGTTCACTGTCAGCCTCTGTGGGCGACAGAG |
| | TGACCATTGCATGCAGGGCCTCTCAGGTTATTAGTAACTACTTGGCTTGGTACCAGCAGAAACCTGG |
| | GAAGGTTCCCAAACTGCTGATATACGTAGCTTCGACTCTACAGTCAGGCGTGCCATCCCGTTTTAGC |
| | GGAAGCGGTAGCGGCACTGATTTCACGCTCACCATCTCCTCCCTGCAACCCGAGGATGTTGCCACGT |
| | ATTATTGTCAAAACTACAATAGTGCGCCTTGGACTTTCGGGCAAGGGACAAAGTTAGAGATCAAG |
| SLC34A2 | GAGATTGTCTTGACCCAGTCTCCCTCTTCACTGTCGGCCTCTGTTGGGGACCGCGTAACCATTACCT |
| Ab 7 scFv | GCCGGGCCTCTCAGTCAATCAGTTCTTACCTGAATTGGTACCAGCAGAAGCCAGGGCGGGCACCCGA |
| (VL-VH) | ACTGCTGATCTACGCAGCCAGCAGCCTGCAGTCTGGGGTGCCCTCGAGGTTTAGCGGCTCAGGAAGC |
| SEQ ID | GGAACAGACTTCACACTCACAATCTCCTCCCTCCAACCCGAGGACTTCGCCACATACTATTGCCAGC |
| NO: 1218 | AATCATTTTCCTCCCTAACCTTCGGCCAGGGTACTAGGCTCGAAATCAAGGGCTCAACTTCTGGGAG |
| | CGGCAAACCTGGTAGCGGAGAGGGTTCTACCAAGGGACAGGTCCAACTGCAAGAATCGGGCCCTGAG |
| | TTAGTTAAACCTAGCGAAACGTTGTCCATTACATGTACCGTGAGTGGTGGCTCTATCTCCTCCAGAA |
| | GTTATTATTGGGGCTGGATTAGACAGCCACCTGGGAAAGGGCTCGAGTGGATCGGGTCCATATACTA |
| | CGGAGGCAGCACCTACTATAATCCAAGTCTGAAGAGTCGAGTAACTATATCAGCGGATACGAGCAAG |
| | AACCAGTTTAGCCTTAAACTTAACAGTGTGACCGCCGCTGATACTGCTGTGTTCTATTGTGTCCGCC |
| | ACCCGGCTGGATATAGCACTCGTTGGAGTGCATTTGATATTTGGGGACAAGGCACAATGGTGACTGT |
| | GTCCTCC |
| SLC34A2 | GAGATTGTGCTGACACAGAGCCCTTCTTCGCTGAGTGCCAGTGTCGGAGATCGGGTCACAATTACCT |
| Ab 8 scFv | GTAGGGCATCACAGTCAATCTCCTCCTACCTGAACTGGTACCAGTTGAAGCCTGGCAAGGCTCCCAA |
| (VL-VH) | ACTTTTGATATACGCTGCTTCCAGCCTGCATAGCGGTGTGCCTTCACGCTTTTCTGGATCTGGTAGC |
| SEQ ID | GGGACAGACTTCACGCTCACCATTAGTTCTTTACAACCCGCCGACTTCGCAACCTATTATTGTCAAC |
| NO: 1219 | AGGCGTATATCTCTCTTACATTTGGCCAAGGGACCAGGCTCGAAATCAAGGGCTCGACTAGCGGTTC |
| | AGGGAAGCCAGGCAGCGGCGAAGGCTCAACCAAGGGACAAGTGCAGCTCCAGGAGAGCGGGCCAGGG |
| | CTGGTGAAACCAAGTGAAACGCTGTCCCTGACTTGCACGGTTAGCGGCGGCTCGATCTCCTCCAGAT |
| | CATATTACTGGGGATGGATCCGACAGCCTCCCGGCAAAGGGCCGGAGTGGATTGGAAGTATCTACTA |
| | TAGCGGGTCTACATTCTACAATCCCTCCCTAAAATCCAGAGTTACCATTAGTGAGGACACCAGCAAA |
| | TCACAGTTCAGCTTAAAGGTCACTAGCGTTACTGCCGCAGATACCGCTGTGTACTATTGCGCCCGTC |
| | ACCCAGCCGGATACAGTTCTTCTTGGTCTGCCTTTGATATATGGGGTCAGGGAACTATGGTAACAGT |
| | GTCCTCC |
| SLC34A2 | GATATTCAGATGACACAGAGCCCTAGCTCCCTTTCCGCTTTTGTCGGCGACCGGGTGACTATTACTT |
| Ab 9 scFv | GCAGGGCCTCGCAGGACATAGGCAATTACCTGGCCTGGTATCAACAGACGCCTGAAAAAGTCCCGAA |
| (VL-VH) | ACTGCTGATCTACGCTGCCTCGACTCTCCAGTCAGGCGTGCCCTCTCGCTTTTCTGGGTCTGGATCA |
| SEQ ID | GGGACAGATTTCACTCTGACCATCTCATCACTGCAACCAGAGGATGTCGCAACCTATTACTGCCAAA |
| NO: 1220 | ACTACTATTCAGTTCCCTGGACCTTTGGCCAAGGGACAAAGGTGGAGATCAAGGGATCTACAAGCGG |
| | GAGTGGCAAGCCAGGGAGCGGAGAGGGTAGCACCAAGGGTCAGGTACAGCTGGTCGAATCCGGTGGC |
| | GGATTGGTACAGCCAGGAAGGAGTTTACGGCTTTCCTGTAGTGGATCTGGTTTTACGAGCGGTGATT |
| | ATGCAGTGTCCTGGGTTAGACAGGCACCCGGGAAAGGCCTAGAGTGGGTTGGCTTCATCAGAACCAA |
| | GCCTTACGGAGAAACCACAGAGTACGCTGCCAGTGTGAAAGGCCGATTCACCATTAGCCGCGACGAC |
| | AGCAAGAGTATCGCCTATCTCCAGATGAACTCTCTCAAAGCTGAAGACACAGCGGTGTTCTACTGTA |
| | CCTTCATACCCGTCAGCCGTTTTTTAGAGTGGTTGCCGTGGGGACAAGGGATTCCTGTGACTGTGTC |
| | CTCC |
| SLC34A2 | GATATTCAGATGACTCAGTCTCCTTCGTCACTGTCAGCGAGCGTAGGCGACCGGGTCACTATTACTT |
| Ab 10 scFv | GCAGGGCCTCTCAAGGAATCAGTAATTACCTGGCTTGGTACCAGCAGCGCCCAGGGAAAGTTCCAAA |
| (VL-VH) | GCTGCTGATCTACGCCGCATCAACACTGAGATCAGGCGTGCCCTCTAGATTTAGCGGGTCAGGGTCT |
| SEQ ID | GGGACAGACTTCACCCTCACTATCAGCTCCCTCCAGCCCGAGGACGTGGCGACCTATTATTGCCAGA |
| NO: 1221 | AGTACAATTCCGCTCCGCTGACATTTGGCGGAGGCACAAAGGTGGAAATCAAGGGCTCTACAAGTGG |
| | TAGCGGAAAACCCGGTAGCGGCGAAGGGAGCACCAAGGGACAAGTGCAGCTCCTAGAGTCGGGCGGT |
| | GGGTTGGTTCAACCTGGAGCCAGCCTTCGGTTATCCTGTGCCGCAAGTGGTTTCACCTTTTCTACCT |
| | ACGCCATGACCTGGGTCAGGCAGGCACCTGGCAAAGGTTTAGAGTGGGTGAGTGGGATTAACGGCGG |
| | AGGTGACACCACCTATTATGCAGATAGTGTTAAAGGGCGATTCACCATATCCCGCGACAATTCCAAG |
| | AACACGCTTTACCTACAGATGAACAGCTTGAGGGCCGAAGATACGGCTGTCTACTATTGTGCTGTCC |
| | GTGGCTATACTTACGGCTATTTTTTCGATTACTGGGGACAAGGAACGCTCGTGACAGTGTCCTCC |
| SLC34A2 | GAGATCGTCCTGACACAGAGTCCCTCATCACTGAGTGCCTCTGTTGGGGATCGGCTAACCATTACAT |
| Ab 11 scFv | GTAGAGCCTCCCAGACCATCTCATCATATCTTAATTGGTATCAGCAAAAACCCGGGAAGGCACCTAA |
| (VL-VH) | AGTGCTGATCTACGCAGCATCCTCTCTTCAGAGCGGCGTCCCATCTCGCTTTAGCGGTTCTGGGTCT |
| SEQ ID | GGGACTGACTTCACTCTCACTATCTCATCATTGCAACCTGAGGACTTCGCTACATACTATTGCCAGC |
| NO: 1222 | AGTCCTTCATCATACCTTACACGTTTGGACAAGGCACAAAGCTCGAGATAAAGGGATCGACTAGCGG |
| | CAGCGGGAAACCTGGTAGCGGCGAAGGAAGTACCAAGGGACAGGTTCAGTTGCAGGAATCGGGCCCA |
| | GGCCTGGTCAAACCGAGTGAAACGCTGTCCTTAACCTGCACCGTATCTGGAGGCAGCATCTCCTCAA |
| | GCTCTTATTACTGGGGCTGGATTAGGCAGCCACCCGGCAAAGGCCTGGAGTGGATTGGTTCCTTGTA |
| | CTACAGCGGGAGCACCTATTACAACCCAAGCCTGAAGTCCCGAGTAACCATTAGTGTGGACACTTCC |
| | AAGAACCAATTCAGTCTGAAGCTCAACTCTGTGACCGCTGCGGATACTGCCGTGTACTATTGCACGA |
| | GGCACCCTAGAGGAATTGCCGCTCGTTGGGGAAATTGGTTTGATCCCTGGGGTCAGGGTACACTCGT |
| | GACAGTGTCCTCC |
| SLC34A2 | GAAATTGTACTCACCCAAAGCCCAAGCTCCCTGTCCGCCTCTGTTGGTGATCGGGTCACAATAACAT |
| Ab 12 scFv | GCAGGGCGTCACAGAGCATCTCCTCCTACCTGAACTGGTACCAGCAGAAGCCTGGCAAGGCACCGAA |
| (VL-VH) | GCTGCTGATATACGCCGCCTCTAGTCTACAGTCTGGGGTGCCCTCTCGCTTTAGCGGCAGCGGGAGT |
| SEQ ID | GGAACGGACTTCACTCTCACGATTTCATCGTTGCAACCCGAGGACTTTGCAACATATTATTGCCAGC |
| NO: 1223 | AGAGCTATAGCACTCCATTCACCTTCGGGCCTGGGACAAAGGTCGATATCAAGGGAAGCACTTCAGG |
| | AAGTGGCAAACCTGGGTCTGGGGAGGGTTCGACCAAGGGACAGGTCCAACTGCAAGAATCAGGTCCC |
| | GGGCTGGTTAAACCTTCAGAAACCTTGTCCTTAACTTGTACCGTATCAGGCGGAAGTATCTCCTCCT |
| | CTTCTTATTATCGAGGCTGGATTAGACAGCCACCCGGCAAAGGCCTTGAGTGGATTGGCTCCATCTA |
| | CTACAGCGGCAGCACGTACTATAACCCAAGCCTGAAAAGTAGGGTGACTATCTCTGTGGACACTTCT |
| | AAGAATCAGTTCAGTCTCAAACTTTCATCCGTGACCGCCGCGGACACCGCTGTGTACTATTGTGCTA |
| | GACACCCGCGTGGAAGTTACGGCGCTAATTTTGATTACTGGGGTCAGGGAACACTCGTTACAGTGTC |
| | CTCC |
| SLC34A2 | CAAGTGCAACTGCAAGAATCAGGGCCTGGTTTGGTCAAGCCATCTGAGACACTTTCCTTAACTTGTA |
| Ab 12 scFv | CGGTATCTGGTGGGTCAATCTCCTCCTCATCATATTACCGCGGGTGGATTAGGCAGCCACCCGGCAA |
| (VH-VL) | AGGACTGGAGTGGATTGGAAGTATATACTATTCCGGCTCAACGTACTACAACCCAAGCCTGAAGAGT |
| SEQ ID | CGGGTCACTATAAGTGTGGACACTAGCAAGAATCAATTTTCCCTGAAACTCTCGAGCGTTACCGCAG |
| NO: 1224 | CCGATACCGCGGTGTACTATTGTGCTAGACACCCTCGAGGGAGCTATGGCGCTAATTTCGACTATTG |
| | GGGTCAGGGAACATTGGTTACTGTGTCCTCCGGCAGCACCAGCGGGTCAGGGAAACCTGGGAGCGGC |
| | GAAGGCTCTACCAAGGGCGAAATTGTACTCACACAGAGTCCATCTTCCCTTTCCGCAAGTGTCGGAG |
| | ACAGAGTTACTATTACTTGCAGGGCCTCTCAGAGCATCTCTAGTTACCTGAACTGGTACCAGCAGAA |
| | ACCGGGCAAAGCACCCAAGCTCCTAATCTACGCTGCCAGCTCTCTGCAGTCTGGTGTGCCTAGTCGT |
| | TTTTCAGGAAGCGGCTCCGGAACAGATTTCACCCTCACCATCAGCTCGTTACAGCCGGAGGACTTCG |
| | CCACCTATTACTGCCAGCAGAGCTATTCTACACCCTTCACCTTTGGACCCGGCACAAAAGTGGATAT |
| | CAAG |
| SLC34A2 | GACATTCAGATGACCCAATCTCCTTCTTCTCTGAGTGCTTCGGTTGGGGATCGGGTCACTGTCACCT |
| Ab 13 scFv | GTCGCGCTAACCAGGACATTAACAATTACCTGGCTTGGTACCAGCAGACACCCGGCAAAGTACCAAA |
| (VL-VH) | ACTCCTTATTTACGCCGCAAGCACTCTGCAGAGCGGAGTACCAAGTCGATTCAGCGGATCAGGCTCT |
| SEQ ID | GGGACTGATTTCACACTGACCATCTCCTCACTGCAACCTGAGGACGTCGCCACGTACTATTGCCAGA |
| NO: 1225 | ATTATTACAGCGTGCCCTGGACCTTTGGTCAGGGAACAAAGCTGGAAATCAAGGGCTCAACTTCTGG |
| | CTCAGGAAAACCGGGCAGCGGTGAAGGCTCCACCAAGGGACAGGTTCAGTTAGTTGAGTCTGGTGGC |
| | GGGCTTGTCCAACCCGGTAGGAGCTTGCGGCTGAGTTGCATAGGGAGTGGGTTCACGTTTGGGGAAT |
| | ATGCCATGAGTTGGGTGAGGCAGGCACCTGGCAAAGGGCTAGAGTGGGTGGGGTTCATCAGAACCAA |
| | GCCATACGGTGGCACCACTGAATTTGCGGCAAGCGTGAAGGGAAGATTCACGATGTCCCGCGATGAC |
| | TCCAAATCAATCGCCTATCTCGAGATGAACTCCCTCAAGACCGAGGACACTGCGGTGTACTATTGTA |
| | CACTCATACCCGCCCTTCGTTTTCTGGAGTGGTTGCCCTGGGGACAAGGCACATTGGTGACAGTGTC |
| | CTCC |
| SLC34A2 | GAGATCGTTCTGACCCAGTCACCTGATTTCCAGAGCGTAACACCTAAAGAATCTGTGACTATAACTT |
| Ab 14 scFv | GTCGGGCAAGCCAGTCTGTCGGATCAGGCCTCCACTGGTACCAGCAGAAGCCCGACCAGAGTCCCAA |
| (VL-VH) | GCTCCTAATCAAATATGCCAGTCAGAGCTTCTCAGGAGTCCCAAGTCGATTTTCAGGGAGTGGCAGC |
| SEQ ID | GGAACAGATTTCACATTGACAATCAATTCCCTGGAAGCCGAGGACGCGGCCACATATTATTGCCTCC |
| NO: 1226 | AATCTAGCAGCCTGCCCTGGACTTTTGGGCAAGGCACGAAGGTGGAAATCAAGGGCTCGACAAGCGG |
| | CTCTGGCAAACCGGGCTCTGGTGAAGGGTCTACCAAGGGACAAGTGCAACTGCAAGAGAGCGGACCA |
| | GGGCTGGTGAAACCCTCTGAGACCCTTTCCCTGACCTGTACGGTTTCAGGAGGGTCCGTGTCCTCCG |
| | GTAGTTATTACTGGTCATGGATTAGACAGCCTCCGGGTAAAGGGTTAGAGTGGATTGGCTACATATT |
| | CTACTCCGGGTCTACGTACTATAACCCTAGTTTGAAGTCGCGCGTTACCATTAGCGTGGACACTAGC |
| | AAGAACCAATTCTCCCTTAAGCTCACCAGTGTGACAGCCGCAGACACCGCTGTCTACTTTTGCGCTA |
| | GGTGGATGACCACTGTCAAAGGCTACTTTGATTATTGGGGTCAGGGAACCCTGGTAACTGTCTCCTC |
| | C |
| SLC34A2 | GATATTCAGATGACCCAAAGCCCTAGTTCCCTGTCCGCAAGTGTTGGGGACCGGGTGACTATTACAT |
| Ab 15 scFv | GCCGAGCTTCTCAAAGCATCAGCTCATACCTGAACTGGTACCAGCAGAAACCCGGCAAGGCACCTAA |
| (VL-VH) | GTTCCTGATTAGCCCAGCCTCTAGCCTGCAGTCTGGCGTACCCAGTCGCTTTTCTGGGTCCGGCTCT |
| SEQ ID | GGCACGGATTTCACGCTAACAATCAGCTCGCTTCAGCCGGAGGACTTTGCCACTTATTATTGCCAGC |
| NO: 1227 | AATCATATAGCATACCTTGGACATTTGGCCAAGGGACAAAGGTGGAAATCAAGGGATCAACCTCTGG |
| | CTCTGGCAAACCTGGGAGCGGTGAGGGAAGTACCAAAGGACAGGTTCAGTTGCAGGAAAGCGGGCCC |
| | GGGCTGGTCAAACCATCAGAAACCTTGTCCTTAACCTGTACCGTAAGCGGCGGAAGTGTGTCCTCCG |
| | CTTCATATTATTGGTCGTGGATAAGGCAGCCACCCGGAAAAGGGCTCGAGTACATTGGATACATCTA |
| | CTATTCAGGATCTACTTACTACAACCCAAGCCTGAAGTCAAGAGTGACCATCTCCATTGATACCTCC |
| | AAGAATCAGTTCAGTCTTAATCTCAGGAGTGTCACTGCTGCCGACACAGCGGTGTACTATTGCGCCA |
| | GATACATCGTCGGTCGTCCCGGCTTCAACTGGTTTGACCCGTGGGGTCAGGGTACACTCGTGACTGT |
| | GTCCTCC |
| SLC34A2 | GATATTCAGATGACTCAGAGTCCCTCATCCCTTTCCGCTTCTGTCGGCGACCGCGTTACAATCACCT |
| Ab 16 scFv | GTAGGGCCTCGCAGACAATCAGTTCGTACCTGAACTGGTATCAACAGAAACCTGGGAAGGCTCCTAA |
| (VL-VH) | ACTCCTCATAAGTCCTGCCTCAAATTTACAGTCTGGGGTCCCAAGCAGATTTTCTGGATCAGGGTCT |
| SEQ ID | GGGACGGATTTCACCCTGACTATCAGCTCGCTGCAGCCGGAGGACTTTGCCACGTATTATTGCCAGC |
| NO: 1228 | AATCATACATCATTCCCTGGACCTTTGGCCAGGGAACAAAGGTCGAGATCAAGGGTAGCACTAGCGG |
| | CAGCGGAAAACCGGGCTCTGGCGAAGGGTCTACCAAGGGTCAAGTGCAGCTCCAAGAATCAGGGCCC |
| | GGGTTGGTTAAACCAAGTGAAACCCTTTCCCTGACTTGCACCGTTAGCGGAGATTCTGTGTCCTCCG |
| | TGTCCTATTACTGGAGCTGGATACGACAGCCACCTGGCAAGGGACTGGAGTGGATTGGCTACATCTG |
| | GTACAGCGGCAGCACCTATTACAACCCAAGTCTAAAGTCTCGGGTGACAATTTCCATTGACACTTCA |
| | AAGAATCAGTTCAGCCTGAAGTTAAGGAGTGTGACCGCAGCCGACACTGCGGTGTACTATTGTGCAA |
| | GATACATCGTAGGCCGTCCCGGTTTCAACTGGTTCGATCCCTGGGGTCAGGGAACATTGGTGACAGT |
| | ATCCTCC |
| SLC34A2 | CAGGTCCAACTGCAAGAATCGGGTCCAGGGCTGGTGAAACCCAGCGAAACCCTTAGTCTGACTTGTA |
| Ab 16 scFv | CCGTATCCGGAGACTCCGTGTCCTCCGTCAGTTATTATTGGAGCTGGATTCGGCAGCCACCTGGGAA |
| (VH-VL) | GGGCCTGGAGTGGATTGGCTACATCTGGTACTCTGGGTCAACTTACTATAACCCATCGCTCAAAAGC |
| SEQ ID | CGCGTAACGATAAGTATCGACACGAGCAAAAATCAATTCTCATTGAAGCTCAGGAGCGTGACAGCCG |
| NO: 1229 | CAGATACTGCGGTGTACTATTGTGCTAGATACATCGTGGGTAGGCCCGGCTTCAACTGGTTTGATCC |
| | CTGGGGACAAGGCACACTCGTTACCGTGTCCTCCGGCAGCACTTCAGGGTCTGGAAAACCGGGAAGC |
| | GGAGAGGGCTCTACCAAGGGCGATATTCAGATGACCCAGTCTCCAAGCTCCCTTTCCGCTTCTGTTG |
| | GGGATCGAGTGACAATTACATGCAGAGCCAGTCAGACCATCTCATCTTACCTGAACTGGTATCAGCA |
| | AAAGCCCGGGAAGGCACCGAAACTGCTGATTAGTCCCGCCAGTAATCTACAGTCAGGTGTCCCTAGC |
| | CGTTTCTCTGGAAGCGGTTCTGGCACGGACTTCACGTTGACAATCAGTTCCTTACAGCCTGAGGACT |
| | TTGCCACCTATTACTGCCAGCAGTCATACATAATCCCTTGGACCTTTGGCCAGGGAACAAAGGTCGA |
| | AATCAAG |
| SLC34A2 | CAGGTTCAGCTCGTCCAGTCTGGGGCAGAAGTAAAAAAGCCTGGGGCTAGTGTGAAGGTGTCCTGTA |
| Ab 17 | AGGCGTCCGGATATACATTCACCGGCTATAACATCCACTGGGTTCGGCAGGCACCAGGCCAGGGACT |
| (VL-VH) | AGAATGGATGGGCGCTATATACCCAGGAAATGGAGATACTTCTTATGCCCAAAAATTTCAAGGCCGC |
| SEQ ID | GTTACCATGACAGCAGATACCAGCACTTCTACCGTCTACATGGAGCTCAGTAGCCTTAGGAGTGAGG |
| NO: 1230 | ACACGGCTGTGTACTATTGCGCCAGAGGAGAAACTGCGCGAGCCACCTTTGCCTACTGGGGACAAGG |
| | CACGCTGGTGACAGTGTCCTCCGGCAGCACAAGCGGGTCTGGGAAACCTGGTTCTGGGGAGGGCTCA |
| | ACGAAGGGCGACATTCAGATGACTCAGTCACCCTCATCCCTGTCCGCCTCAGTCGGAGATAGAGTGA |
| | CCATTACCTGTAGGGCCTCGCAGGACATTGGGAACTTCCTGAATTGGTACCAACAGAAACCCGGCAA |
| | GGCACCAAAAGTGCTGATCTACTACACCAGCTCCCTGTACTCAGGCGTACCCAGTCGTTTTAGCGGT |
| | AGTGGTAGCGGGACTGACTATACATTGACCATCTCGTCTTTGCAACCTGAAGATTTCGCTACTTATT |
| | ACTGCCAGCAGTATAGCAAACTCCCGCTTACATTCGGTCAGGGTACAAAGTTAGAGATCAAG |
| SLC34A2 | CAAGTGCAGTTGGTACAGTCTGGGGCAGAGGTCAAAAAACCCGGTGCAAGTGTTAAAATGAGTTGCA |
| Ab 18 | AGGCCTCCGGCTACACCTTTACCGGCTATAACATCCATTGGGTTCGGCAGGCACCGGGCCAGGGCCT |
| (VL-VH) | GGAATGGATAGGAGCTATCTACCCAGGCAATGGCGATACATCGTATGCTCAGAAGTTCCAAGGGCGC |
| SEQ ID | GCTACCCTCACCGCGGACACTAGCACCTCTACAGTGTATATGGAACTGTCTAGCCTGAGGTCCGAGG |
| NO: 1231 | ACACAGCGGTGTACTATTGCGCCAGAGGAGAGACTGCCCGAGCCACTTTCGCCTACTGGGGTCAGGG |
| | TACACTCGTGACTGTGTCCTCCGGGTCTACGTCAGGGAGTGGCAAACCTGGGTCTGGGGAGGGAAGT |
| | ACGAAGGGTGATATTCAGATGACTCAGAGCCCAAGCTCACTGTCAGCTTCGGTCGGCGATAGAGTAA |
| | CTATTACATGTCGTGCCAGTCAAGACATTGGAAATTTCCTTAACTGGTATCAGCAAAAGCCTGGAAA |
| | GGCACCCAAAGTTCTAATCTACTACACAAGCTCCTTGTACTCCGGCGTCCCAAGCAGGTTTTCAGGC |
| | TCAGGTTCTGGAACAGACTATACCCTGACCATATCCAGCCTTCAGCCCGAGGATTTTGCCACCTACT |
| | ATTGTCAACAGTACAGCAAACTCCCTCTAACCTTCGGGCAGGGAACGAAGTTAGAAATCAAG |
| SLC34A2 | GACATTCAAATGACTCAGTCGCCCTCTTCACTGTCAGCTTCTGTTGGGGATCGTGTAACCATTACCT |
| Ab 19 | GTAGGGCATCCCAGGATATAGGAAACTTCCTGAATTGGTATCAGCAAAAGCCCGGCAAAGCTCCAAA |
| (VL-VH) | GCTGCTGATCTACTACACCAGCAGCCTTTATTCAGGTGTCCCAAGCAGATTCTCCGGCAGCGGGTCC |
| SEQ ID | GGCACAGACTTCACCCTGACCATCTCTAGCCTACAGCCCGAGGACTTTGCAACATATTATTGTCAAC |
| NO: 1232 | AGTACAGTAAATTGCCACTGACGTTTGGGCAAGGTACAAAGCTCGAGATCAAGGGCTCGACAAGCGG |
| | CTCAGGCAAACCGGGCTCTGGGGAAGGAAGTACCAAGGGTCAGGTCCAGCTCGTACAGAGTGGAGCC |
| | GAAGTCAAAAAGCCTGGCGCGAGTGTTAAAGTGTCCTGCAAGGCCTCTGGGTACACATTCACCGGTT |
| | ACAACATCCACTGGGTTCGACAGGCTCCTGGCCAGGGACTTGAGTGGATGGGAGCCATTTACCCTGG |
| | GAATGGGGACACTTCTTATGCACAGAAATTTCAGGGTAGGGTGACTATGACTAGAGATACGTCAACG |
| | TCCACTGTCTACATGGAGTTGAGTAGCTTACGGAGCGAAGATACCGCCGTGTACTATTGCGCTCGCG |
| | GAGAGACAGCCCGGGCCACTTTTGCATATTGGGGACAAGGCACACTCGTGACCGTGTCCTCC |

[0585] In some embodiments, the antibody or antigen-binding fragment that binds to SLC34A2 comprises an scFv encoded by a nucleic acid sequence at least 80%, at least 85%, at least 90%, at least 91%, at least 92%, at least 93%, at least 94%, at least 95%, at least 96%, at least 97%, at least 98%, at least 99%, at least 99.5% or 100% identical to the nucleic acid sequence set forth in SEQ ID NOs: 1116, 1117, 1118, 1209, 1210, 1211, 1212, 1213, 1214, 1216, 1217, 1218, 1219, 1220, 1221, 1222, 1223, 1224, 1225, 1226, 1227, 1228, 1229, 1230, 1231, or 1232, optionally wherein the V_{H} CDRs and the V_{L} CDRs are identical to those encoded by 1116, 1117, 1118, 1209, 1210, 1211, 1212, 1213, 1214, 1216, 1217, 1218, 1219, 1220, 1221, 1222, 1223, 1224, 1225, 1226, 1227, 1228, 1229, 1230, 1231, or 1232, respectively. In some embodiments, the antibody or antigen-binding fragment that binds to SLC34A2 comprises an scFv encoded by the nucleic acid sequence set forth in any one of SEQ ID NOS: 1116, 1117, 1118, 1209, 1210, 1211, 1212, 1213, 1214, 1216, 1217, 1218, 1219, 1220, 1221, 1222, 1223, 1224, 1225, 1226, 1227, 1228, 1229, 1230, 1231, or 1232.

### Synthetic Immune Receptors

[0586] In some aspects, the present disclosure provides a synthetic immune receptor. In some embodiments, the synthetic immune receptor comprises an extracellular domain comprising a TMPRSS4 antibody or antigen-binding fragment thereof provided herein.

### Chimeric Antigen Receptors

[0587] In some aspects, the synthetic immune receptor is a chimeric antigen receptor (CAR). The CAR may be a human CAR, comprising fully human sequences, e.g., natural human sequences. An exemplary CAR comprises, from N-terminus to C-terminus, an antigen-binding domain (e.g., an extracellular antigen binding domain); a transmembrane domain; an intracellular co-stimulatory domain; and an intracellular activation domain.

[0588] In some embodiments, the chimeric antigen receptor includes an extracellular portion comprising an antigen binding domain. The antigen recognition domain of a receptor such as a CAR can be linked to one or more intracellular signaling components, such as signaling components that mimic activation through an antigen receptor complex, such as a TCR complex, in the case of a CAR, and/or signal via another cell surface receptor. Thus, in some embodiments, the extracellular binding component (e.g., ligand-binding or antigen-binding domain) is linked to one or more transmembrane and intracellular signaling domains. In some embodiments, the transmembrane domain is fused to the extracellular domain. In one embodiment, a transmembrane domain that naturally is associated with one of the domains in the receptor, e.g., CAR, is used. In some instances, the transmembrane domain is selected or modified by amino acid substitution to avoid binding of such domains to the transmembrane domains of the same or different surface membrane proteins to minimize interactions with other members of the receptor complex.

[0589] In various embodiments, a CAR comprises means for binding a TMPRSS4 protein, optionally binding a human TMPRSS4 protein in the region(s) of human TMPRSS4 bound by the TMPRSS4 antibody or antigen binding fragment (e.g., as described in the Examples below). In some embodiments, the means binds a TMPRSS4 protein. In some embodiments, the means binds a human TMPRSS4 protein. In some embodiments, the means is a TMPRSS4 antibody or antigen-binding fragment or equivalent thereof (e.g., a full length antibody or a F(ab′)₂ fragment, a Fab fragment, a single chain variable fragment (scFv), and a single domain antibody (sdAb), or a functional fragment thereof) means for binding a TMPRSS4 protein. In some embodiments, the means for binding TMPRSS4 includes the anti-TMPRSS4 antibodies and antigen-binding fragments or equivalents thereof described herein.

[0590] In some aspects, the chimeric antigen receptor includes an extracellular portion comprising a TMPRSS4 antigen binding domain described herein and an intracellular signaling domain. In some embodiments, the antigen binding domain (e.g., an antibody or antigen binding fragment thereof) is referred to as a “binder.” In some embodiments, the antigen-binding domain is selected from the group consisting of an antibody, a nanobody, a diabody, a triabody, or a minibody, a F(ab′)₂ fragment, a Fab fragment, a single chain variable fragment (scFv), and a single domain antibody (sdAb), or a functional fragment thereof. In some embodiments, the antigen-binding moiety comprises an scFv. The antigen-binding moiety can include naturally-occurring amino acid sequences or can be engineered, designed, or modified so as to provide desired and/or improved properties, e.g., increased binding affinity. In some embodiments, an antibody or fragment includes an scFv, a V_{H}, or a single-domain V_{H} antibody and the intracellular domain contains an ITAM. In some aspects, the intracellular signaling domain includes a signaling domain of a zeta chain of a CD3-zeta (CD3) chain. In some embodiments, the chimeric antigen receptor includes a transmembrane domain linking the extracellular domain and the intracellular signaling domain.

[0591] In some aspects, the transmembrane domain contains a transmembrane portion of CD8α or CD28. The extracellular domain and transmembrane can be linked directly or indirectly. In some embodiments, the extracellular domain and transmembrane are linked by a spacer, such as any described herein. In some embodiments, the chimeric antigen receptor contains an intracellular domain of a T cell costimulatory molecule, such as between the transmembrane domain and intracellular signaling domain. In some aspects, the T cell costimulatory molecule is CD28 or 4-1BB.

[0592] In some embodiments, the N-terminus or C-terminus of the CAR comprises a post-translation modification, such as a deletion or modification of one or more amino acids. For example, the first, second or third N-terminus or C-terminus amino acid can be modified or deleted in the CAR.

[0593] In some embodiments, the CAR comprises SEQ ID NO:1164 wherein the N-terminal amino acid, the two N-terminal amino acids or the three N-terminal amino acids are different from those in SEQ ID NO: 1164, e.g., due to one or more posttranscriptional modification. In some embodiments, the CAR comprises SEQ ID NO:1164 wherein the C-terminal amino acid, the two C-terminal amino acids or the three C-terminal amino acids are different from those in SEQ ID NO: 1164, e.g., due to one or more posttranscriptional modification. In some embodiments, the CAR comprises SEQ ID NO:1166 wherein the N-terminal amino acid, the two N-terminal amino acids or the three N-terminal amino acids are different from those in SEQ ID NO: 1166, e.g., due to one or more posttranscriptional modification. In some embodiments, the CAR comprises SEQ ID NO:1166 wherein the C-terminal amino acid, the two C-terminal amino acids or the three C-terminal amino acids are different from those in SEQ ID NO: 1166, e.g., due to one or more posttranscriptional modification.

### CAR Transmembrane Domain

[0594] The transmembrane domain in some embodiments is derived either from a natural or from a synthetic source. Where the source is natural, the domain in some aspects is derived from any membrane-bound or transmembrane protein. Transmembrane regions include those derived from (i.e. comprise at least the transmembrane region(s) of) the alpha, beta or zeta chain of the T-cell receptor, CD28, CD3 epsilon, CD45, CD4, CD5, CDS, CD9, CD16, CD22, CD33, CD37, CD64, CD80, CD86, CD 134, CD137, and/or CD154. Alternatively the transmembrane domain in some embodiments is synthetic. In some aspects, the synthetic transmembrane domain comprises predominantly hydrophobic residues such as leucine and valine. In some aspects, a triplet of phenylalanine, tryptophan and valine will be found at each end of a synthetic transmembrane domain. In some embodiments, the linkage is by linkers, spacers, and/or transmembrane domain(s).

[0595] In some embodiments, the transmembrane domain of the receptor, e.g., the CAR, is a transmembrane domain of human CD28 or variant thereof, e.g., a 27-amino acid transmembrane domain of a human CD28 (Accession No.: P10747.1).

[0596] In some embodiments, the CAR comprises a CD8α transmembrane domain. In some embodiments, the CD8α transmembrane domain comprises the sequence set forth in SEQ ID NO: 822.

### CAR Hinge

[0597] In some embodiments, the CAR further includes a spacer, which may be or include at least a portion of an immunoglobulin constant region or variant or modified version thereof, such as a hinge region, e.g., a CD8α hinge, a CD4 hinge, a CD28 hinge, an IgG4 hinge region, and/or a CH1/CL and/or Fc region. In some embodiments, the constant region or portion is of a human IgG, such as IgG4 or IgG1. In some aspects, the portion of the constant region serves as a spacer region between the antigen-recognition component, e.g., scFv, and transmembrane domain. The spacer can be of a length that provides for increased responsiveness of the cell following antigen binding, as compared to in the absence of the spacer. In some examples, the spacer is at or about 12 amino acids in length or is no more than 12 amino acids in length. Exemplary spacers include those having at least about 10 to 229 amino acids, about 10 to 200 amino acids, about 10 to 175 amino acids, about 10 to 150 amino acids, about 10 to 125 amino acids, about 10 to 100 amino acids, about 10 to 75 amino acids, about 10 to 50 amino acids, about 10 to 40 amino acids, about 10 to 30 amino acids, about 10 to 20 amino acids, or about 10 to 15 amino acids, and including any integer between the endpoints of any of the listed ranges. In some embodiments, a spacer region has about 12 amino acids or less, about 119 amino acids or less, or about 229 amino acids or less. Exemplary spacers include CD8α hinge, IgG4 hinge alone, IgG4 hinge linked to CH2 and CH3 domains, or IgG4 hinge linked to the CH3 domain. Exemplary spacers include, but are not limited to, those described in Hudecek et al. (2013) Clin. Cancer Res., 19:3153 or international patent application publication number WO2014031687. In some embodiments, the CAR hinge comprises a CD8α hinge. In some embodiments, the CD8α hinge comprises the sequence set forth in SEQ ID NO: 821.

[0598] Among the intracellular signaling domains are those that mimic or approximate a signal through a natural antigen receptor, a signal through such a receptor in combination with a costimulatory receptor, and/or a signal through a costimulatory receptor alone. In some embodiments, a short oligo- or polypeptide linker, for example, a linker of between 2 and 10 amino acids in length, such as one containing glycines and serines, e.g., glycine-serine doublet, is present and forms a linkage between the transmembrane domain and the cytoplasmic signaling domain of the receptor.

### CAR Intracellular Domain

[0599] In some embodiments, upon ligation of the CAR, the cytoplasmic domain or intracellular signaling domain of the receptor activates at least one of the normal effector functions or responses of the immune cell, e.g., T cell engineered to express the receptor. In some embodiments, the CAR comprises means for activating at least one of the normal effector functions or responses of the immune cell, e.g., T cell engineered to express the receptor. For example, in some contexts, the receptor induces a function of a T cell such as cytolytic activity or T-helper activity, such as secretion of cytokines or other factors. In some embodiments, a truncated portion of an intracellular signaling domain of an antigen receptor component or costimulatory molecule is used in place of an intact immunostimulatory chain, for example, if it transduces the effector function signal. In some embodiments, the intracellular signaling domain or domains include the cytoplasmic sequences of the T cell receptor (TCR), and in some aspects also those of co-receptors that in the natural context act in concert with such receptor to initiate signal transduction following antigen receptor engagement, and/or any derivative or variant of such molecules, and/or any synthetic sequence that has the same functional capability. In some embodiments, the means for at least one of the normal effector functions or responses of the immune cell comprises a CAR intracellular activation domain, e.g., an intracellular activation domain provided herein or an equivalent thereof. In some embodiments, the means for at least one of the normal effector functions or responses of the immune cell comprises a CAR intracellular activation domain and a CAR co-stimulatory domain, e.g., a co-stimulatory domain provided herein or an equivalent thereof.

[0600] In some aspects, the receptor includes a primary cytoplasmic signaling sequence that regulates primary activation of the TCR complex. Primary cytoplasmic signaling sequences that act in a stimulatory manner may contain signaling motifs which are known as immunoreceptor tyrosine-based activation motifs or ITAMs. Examples of ITAM containing primary cytoplasmic signaling sequences include those derived from TCR or CD3 zeta, FcR gamma, FcR beta, CD3 gamma, CD3 delta, CD3 epsilon, CDS, CD22, CD79a, CD79b, and CD66d. In some embodiments, cytoplasmic signaling molecule(s) in the CAR contain(s) a cytoplasmic signaling domain, portion thereof, or sequence derived from CD3 zeta.

[0601] In some embodiments, the intracellular signaling domain comprises a human CD3 zeta stimulatory signaling domain or functional variant thereof, such as a 112 AA cytoplasmic domain of isoform 3 of human CD3.zeta. (Accession No.: P20963.2) or a CD3 zeta signaling domain as described in U.S. Pat. No. 7,446,190 or U.S. Pat. No. 8,911,993.

[0602] The receptor, e.g., the CAR, can include at least one intracellular signaling component or components. In some embodiments, the receptor includes an intracellular component of a TCR complex, such as a TCR CD3 chain that mediates T-cell activation and cytotoxicity, e.g., CD3 zeta chain. Thus, in some aspects, the extracellular domain is linked to one or more cell signaling modules. In some embodiments, cell signaling modules include CD3 transmembrane domain, CD3 intracellular signaling domains, and/or other CD transmembrane domains. In some embodiments, the receptor, e.g., CAR, further includes a portion of one or more additional molecules such as Fc receptor-gamma, CD8, CD4, CD25, or CD16. For example, in some aspects, the CAR includes a chimeric molecule between CD3-zeta or Fc receptor-gamma and CD8, CD4, CD25 or CD16. In some embodiments, the CAR comprises a CD35 activation domain comprising the sequence set forth in SEQ ID NO: 824.

[0603] In some embodiments, the intracellular domain comprises an intracellular costimulatory signaling domain of 4-1BB or functional variant or portion thereof, such as a 42-amino acid cytoplasmic domain of a human 4-1BB (Accession No. Q07011.1) or functional variant or portion thereof.

[0604] In some embodiments, the receptor encompasses one or more, e.g., two or more, costimulatory domains and an activation domain, e.g., primary activation domain, in the cytoplasmic portion. Exemplary receptors include intracellular components of CD3-zeta, CD28, and 4-1BB. In some embodiments, the chimeric antigen receptor contains an intracellular domain of a T cell costimulatory molecule. In some aspects, the T cell costimulatory molecule is 4-1BB.

[0605] In some embodiments, the receptor includes a signaling domain and/or transmembrane portion of a costimulatory receptor, such as CD28, 4-1BB, OX40, DAP10, and ICOS. In some aspects, the same receptor includes both the activating and costimulatory components. In some embodiments, the same receptor includes multiple costimulatory components.

[0606] In certain embodiments, the intracellular signaling domain comprises a CD8α transmembrane and signaling domain linked to a CD3 (e.g., CD3-zeta) intracellular domain. In some embodiments, the intracellular signaling domain comprises a 4-1BB (CD137, TNFRSF9) co-stimulatory domains, linked to a CD3 zeta intracellular domain. In some embodiments, the CAR comprises a 4-1BB co-stimulatory domain. In some embodiments, the 4-1BB co-stimulatory domain comprises the sequence as set forth in SEQ ID NO: 823.

[0607] In some embodiments, the CAR or other antigen receptor further includes a marker, such as a cell surface marker, which may be used to confirm transduction or engineering of the cell to express the receptor, such as a truncated version of a cell surface receptor, such as truncated EGFR (tEGFR). In some aspects, the marker includes all or part (e.g., truncated form) of CD34, a nerve growth factor receptor (NGFR), or epidermal growth factor receptor (e.g., tEGFR). In some embodiments, the nucleic acid encoding the marker is operably linked to a polynucleotide encoding for a linker sequence, such as a cleavable linker sequence or a ribosomal skip sequence, e.g., T2A. See WO2014031687. In some embodiments, introduction of a construct encoding the CAR and EGFRt separated by a T2A ribosome switch can express two proteins from the same construct, such that the EGFRt can be used as a marker to detect cells expressing such construct. In some embodiments, a marker, and optionally a linker sequence, can be any as disclosed in published patent application No. WO2014031687. For example, the marker can be a truncated EGFR (tEGFR) that is, optionally, linked to a linker sequence, such as a T2A ribosomal skip sequence.

[0608] In some embodiments, the marker is a molecule, e.g., cell surface protein, not naturally found on T cells or not naturally found on the surface of T cells, or a portion thereof.

[0609] In some embodiments, the molecule is a non-self molecule, e.g., non-self protein, i.e., one that is not recognized as “self” by the immune system of the host into which the cells will be adoptively transferred.

[0610] In some embodiments, the marker serves no therapeutic function and/or produces no effect other than to be used as a marker for genetic engineering, e.g., for selecting cells successfully engineered. In other embodiments, the marker may be a therapeutic molecule or molecule otherwise exerting some desired effect, such as a ligand for a cell to be encountered in vivo, such as a costimulatory or immune checkpoint molecule to enhance and/or dampen responses of the cells upon adoptive transfer and encounter with ligand.

[0611] The CAR may comprise one or more modified or synthetic amino acids in place of one or more naturally-occurring amino acids. Exemplary modified amino acids include, but are not limited to, aminocyclohexane carboxylic acid, norleucine, α-amino n-decanoic acid, homoserine, S-acetylaminomethylcysteine, trans-3- and trans-4-hydroxyproline, 4-aminophenylalanine, 4-nitrophenylalanine, 4-chlorophenylalanine, 4-carboxyphenylalanine, (3-phenylserine (3-hydroxyphenylalanine, phenylglycine, α-naphthylalanine, cyclohexylalanine, cyclohexylglycine, indoline-2-carboxylic acid, 1,2,3,4-tetrahydroisoquinoline-3-carboxylic acid, aminomalonic acid, aminomalonic acid monoamide, N′-benzyl-N′-methyl-lysine, N′,N′-dibenzyl-lysine, 6-hydroxylysine, ornithine, α-aminocyclopentane carboxylic acid, α-aminocyclohexane carboxylic acid, α-aminocycloheptane carboxylic acid, α-(2-amino-2-norbomane)-carboxylic acid, α,γ-diaminobutyric acid, α,γ-diaminopropionic acid, homophenylalanine, and α-tertbutylglycine.

[0612] For example, in some embodiments, the CAR includes an antibody or fragment thereof, including single chain antibodies (sdAbs, e.g., containing only the V_{H} region), V_{H} domains, and scFvs, described herein, a spacer such as a CD8α hinge, a CD8α transmembrane domain, a 4-1BB intracellular signaling domain, and a CD3 zeta signaling domain. In some embodiments, the CAR includes an antibody or fragment, including sdAbs and scFvs described herein, a spacer such as a CD8α hinge, a CD8α transmembrane domain, a 4-1BB intracellular signaling domain, and a CD3 zeta signaling domain.

[0613] Exemplary sequences of CAR components are provided in Table 13.

TABLE 13
CAR Components

| Component | Sequence |
|---|---|
| CD8α Hinge Domain | TTTPAPRPPTPAPTIASQPLSLRPEACRPAAGGAVHTRGLDFACD (SEQ ID NO: |
| | 821) |
| CD8α Transmembrane | IYIWAPLAGTCGVLLLSLVITLYC (SEQ ID NO: 822) |
| Domain | |
| 4-1BB Co-stimulatory | KRGRKKLLYIFKQPFMRPVQTTQEEDGCSCRFPEEEEGGCEL (SEQ ID NO: 823) |
| Domain | |
| CD3ζ Activation | RVKFSRSADAPAYQQGQNQLYNELNLGRREEYDVLDKRRGRDPEMGGKPRRKNPQEG |
| Domain | LYNELQKDKMAEAYSEIGMKGERRRGKGHDGLYQGLSTATKDTYDALHMQALPPR |
| | (SEQ ID NO: 824) |
| CD8α signal sequence | MALPVTALLLPLALLLHAARP (SEQ ID NO: 825) |
| Myc Tag | EQKLISEEDL (SEQ ID NO: 826) |
| Flag Tag | DYKDDDDK (SEQ ID NO: 959) |

[0614] Exemplary chimeric antigen receptor (CAR) sequences (nucleic acid and amino acid) are provided in Table 14. In some embodiments, the CAR is encoded by a sequence with at least 80%, 85%, 90%, 91%, 92%, 93%, 94%, 95%, 96%, 97%, 98%, 99%, or 100% identity to SEQ ID NOs: 1163 or 1165. In some embodiments, the CAR comprises a sequence with at least 80%, 85%, 90%, 91%, 92%, 93%, 94%, 95%, 96%, 97%, 98%, 99%, or 100% identity to SEQ ID NOs: 1164 or 1166.

TABLE 14
Exemplary CAR sequences

| Name and | |
|---|---|
| SEQ ID NO | Sequence |
| TMPRSS4 | CAAGTGCAGCTGGTCCAGTCTGGGGCGGAAGTGAAAAAGCCCGGAGCTAGTGTAAAGGTGTCCT |
| Ab48 CAR | GTAAAGCCAGCGGCTACACCTTCACCGGTTATTACCTGCATTGGGTCCGGCAGGCTCCTGGCCA |
| SEQ ID NO: | GGGCCTGGAGTGGATGGGCTGGATTTCCGCATATAACGGAAACACAAATTACGCCCAGAACCTG |
| 1163 | CAAGGCCGCGTGACCATGACCAGGGACACAAGCACTAGCACTGTCTACATGGAGTTGTCTAGCT |
| | TGAGAAGCGAAGATACCGCTGTGTACTATTGCGCCCGACACTCTTACTCGGGCTCATACTCAAC |
| | GCTACCCTATTATGGGATGGATGTTTGGGGTCAAGGGACAACGGTCACAGTATCCTCTGGAGGC |
| | GGTGGCAGCGGAGGAGGCGGGTCTGGAGGTGGTGGATCAGACATTCAGATGACCCAGTCACCAA |
| | GTTCCTTATCCGCAAGCGTTGGGGATCGTGTTACAATTACTTGCAGGGCCTCGCAAGGGATCTC |
| | TAATTATCTCGCTTGGTACCAGCAGAAACCTGGGAAAGCACCCAAGCTGCTGATCTACACTGCA |
| | AGCACACTTTTTCCAGGAGTGCCGTCAAGATTCTCTGGGTCCGGGAGTGGCACTGACTTCACCC |
| | TTACCATCTCCTCCCTCCAGCCTGAGGACTTTGCCACATATTATTGTCAACAGAGTTACTCCAT |
| | ACCACTCACGTTTGGCGGCGGAACAAAaGTtGAAATCAAGGCGGCAGCAaccacgacgccagcg |
| | ccgcgaccaccaacaccggcgcccaccatcgcgtcgcagccactgtcactgcgcccagaagcgt |
| | gccggccagcggcggggggcgcagtgcaTacgagggggctggacttcgcctgtgatatctacat |
| | ctgggcgcccttggccgggacttgtggggtccttctcctgtcactggttatcaccctttactgc |
| | aaacggggcagaaagaaactcctgtatatattcaaacaaccatttatgagaccagtacaaacta |
| | ctcaagaagaggacggctgtagctgccgatttccagaagaagaagaaggaggatgtgaactgag |
| | agtgaagttcagcaggagcgcagacgcccccgcgtaccagcagggccagaaccagctctataac |
| | gagctcaatctaggacgaagagaggagtacgatgttttggacaagaggcgtggccgggaccctg |
| | agatggggggaaagccgagaaggaagaaccctcaggaaggcctgtacaatgaactgcagaaaga |
| | taagatggcggaggcctacagtgagattgggatgaaaggcgagcgccggaggggcaaggggcac |
| | gatggcctttaccagggtctcagtacagccaccaaggacacctacgacgcccttcacatgcagg |
| | ccctgccccctaggtaa |
| TMPRSS4 | QVQLVQSGAEVKKPGASVKVSCKASGYTFTGYYLHWVRQAPGQGLEWMGWISAYNGNTNYAQNL |
| Ab48 CAR | QGRVTMTRDTSTSTVYMELSSLRSEDTAVYYCARHSYSGSYSTLPYYGMDVWGQGTTVTVSSGG |
| SEQ ID NO: | GGSGGGGSGGGGSDIQMTQSPSSLSASVGDRVTITCRASQGISNYLAWYQQKPGKAPKLLIYTA |
| 1164 | STLFPGVPSRFSGSGSGTDFTLTISSLQPEDFATYYCQQSYSIPLTFGGGTKVEIKAAATTTPA |
| | PRPPTPAPTIASQPLSLRPEACRPAAGGAVHTRGLDFACDIYIWAPLAGTCGVLLLSLVITLYC |
| | KRGRKKLLYIFKQPFMRPVQTTQEEDGCSCRFPEEEEGGCELRVKFSRSADAPAYQQGQNQLYN |
| | ELNLGRREEYDVLDKRRGRDPEMGGKPRRKNPQEGLYNELQKDKMAEAYSEIGMKGERRRGKGH |
| | DGLYQGLSTATKDTYDALHMQALPPR |
| TMPRSS4 | CAGGTCCAGTTGGTACAGAGCGGCGCCGAAGTGAAAAAGCCTGGGGCGTCCGTCAAAGTGTCTT |
| Ab49 CAR | GCAAGGCCTCCGGCTATACATTCACCGGGTACTACATGCATTGGGTGCGGCAGGCACCTGGCCA |
| SEQ ID NO: | GGGTCTAGAATGGATGGGCCGGATCAATCCCAACTCCGGCGGCACAAACTATGCTCAGAAATTT |
| 1165 | CAAGGTCGCGTCACCATGACCCGTGACACAAGTACGAGCACCGTCTACATGGAGCTGTCCTCCC |
| | TCAGGAGCGAGGATACAGCCGTGTACTATTGTGCAAGGGAGCGCGCCGGCTATAGCAGCGGGCA |
| | GTTCGATTATTGGGGACAAGGGACTCTGGTAACTGTGTCCTCCGGAGGCGGAGGATCAGGCGGA |
| | GGAGGCTCAGGAGGTGGAGGTTCTGACATTCAGATGACTCAATCTCCCTCGTCACTGTCAGCTA |
| | GTGTTGGGGATAGAGTGACTATTACCTGCCGAGCCAGTCAGTCAATATCTAACTGGCTCGCATG |
| | GTACCAGCAGAAGCCAGGGAAGGCTCCCAAACTGCTGATCTACGCCGCGAGCACCCTTCAGAAT |
| | GGCGTGCCGTCTAGATTTAGCGGTTCTGGGTCTGGGACCGACTTTACACTTACTATCAGTAGTT |
| | TACAACCAGAGGACTTTGCTACTTATTACTGTCAACAGAGCTACACCTTCCCTATTACGTTCGG |
| | CCAGGGAACAAAAGTTGAAATCAAGGCGGCAGCAaccacgacgccagcgccgcgaccaccaaca |
| | ccggcgcccaccatcgcgtcgcagccactgtcactgcgcccagaagcgtgccggccagcggcgg |
| | ggggcgcagtgcaTacgagggggctggacttcgcctgtgatatctacatctgggcgcccttggc |
| | cgggacttgtggggtccttctcctgtcactggttatcaccctttactgcaaacggggcagaaag |
| | aaactcctgtatatattcaaacaaccatttatgagaccagtacaaactactcaagaagaggacg |
| | gctgtagctgccgatttccagaagaagaagaaggaggatgtgaactgagagtgaagttcagcag |
| | gagcgcagacgcccccgcgtaccagcagggccagaaccagctctataacgagctcaatctagga |
| | cgaagagaggagtacgatgttttggacaagaggcgtggccgggaccctgagatggggggaaagc |
| | cgagaaggaagaaccctcaggaaggcctgtacaatgaactgcagaaagataagatggcggaggc |
| | ctacagtgagattgggatgaaaggcgagcgccggaggggcaaggggcacgatggcctttaccag |
| | ggtctcagtacagccaccaaggacacctacgacgcccttcacatgcaggccctgccccctaggt |
| | aa |
| TMPRSS4 | QVQLVQSGAEVKKPGASVKVSCKASGYTFTGYYMHWVRQAPGQGLEWMGRINPNSGGTNYAQKF |
| Ab49 CAR | QGRVTMTRDTSTSTVYMELSSLRSEDTAVYYCARERAGYSSGQFDYWGQGTLVTVSSGGGGSGG |
| SEQ ID NO: | GGSGGGGSDIQMTQSPSSLSASVGDRVTITCRASQSISNWLAWYQQKPGKAPKLLIYAASTLQN |
| 1166 | GVPSRFSGSGSGTDFTLTISSLQPEDFATYYCQQSYTFPITFGQGTKVEIKAAATTTPAPRPPT |
| | PAPTIASQPLSLRPEACRPAAGGAVHTRGLDFACDIYIWAPLAGTCGVLLLSLVITLYCKRGRK |
| | KLLYIFKQPFMRPVQTTQEEDGCSCRFPEEEEGGCELRVKFSRSADAPAYQQGQNQLYNELNLG |
| | RREEYDVLDKRRGRDPEMGGKPRRKNPQEGLYNELQKDKMAEAYSEIGMKGERRRGKGHDGLYQ |
| | GLSTATKDTYDALHMQALPPR |

### Synthetic Transcriptional Modulators

[0615] In various embodiments, the synthetic immune receptor is a synthetic transcriptional modulator. In some embodiments, the synthetic transcriptional modulator is a priming receptor (primeR). A priming receptor can activate transcription of a selected gene or genes following binding to a target antigen.

[0616] The recombinant synthetic immune receptor may be a synthetic human transcriptional modulator, comprising fully human sequences, e.g., natural human sequences. In various embodiments, the synthetic transcriptional modulator comprises (a) an extracellular antigen-binding domain, (b) a transmembrane domain comprising one or more-ligand inducible proteolytic sites, and (c) an intracellular domain comprising a human or humanized transcriptional effector.

[0617] In various embodiments, a synthetic transcriptional modulator comprises means for binding an SCL34A2 protein, optionally binding a human SCL34A2 protein in the region(s) of human SCL34A2 bound by a SCL34A2 antibody or antigen binding fragment (e.g., an antibody or antigen binding fragment thereof as described in the Examples below). In some embodiments, the means binds an SCL34A2 protein. In some embodiments, the means binds a human SCL34A2 protein. In some embodiments, the means is an SCL34A2 antibody or antigen-binding fragment or equivalent thereof (e.g., a full length antibody or a F(ab′)₂ fragment, a Fab fragment, a single chain variable fragment (scFv), and a single domain antibody (sdAb), or a functional fragment thereof) means for binding an SCL34A2 protein. In some embodiments, the means for binding SCL34A2 includes the anti-SCL34A2 antibodies and antigen-binding fragments or equivalents thereof described herein.

[0618] In some aspects, the synthetic transcriptional modulator includes an extracellular portion comprising an SLC34A2 antigen binding domain described herein and an intracellular signaling domain. In some embodiments, the antigen binding domain (e.g., an antibody or antigen binding fragment thereof) is referred to as a “binder.” In various embodiments, the antigen-binding domain of the synthetic transcriptional modulator described herein is selected from the group consisting of an antibody, a nanobody, a diabody, a triabody, or a minibody, a F(ab′)₂ fragment, a Fab fragment, a single chain variable fragment (scFv), and a single domain antibody (sdAb), or a functional fragment thereof. In some embodiments, the antigen-binding moiety comprises an scFv. The antigen-binding moiety can include naturally-occurring amino acid sequences or can be engineered, designed, or modified so as to provide desired and/or improved properties, e.g., increased binding affinity. In some embodiments, an antibody or fragment includes an scFv, a VH, or a single-domain V_{H}H antibody. In some embodiments, the antigen binding domain is referred to as a “binder.”

[0619] In various embodiments, the synthetic transcriptional modulator is based on the Notch protein (i.e., a synNotch). Binding of a natural Notch receptor to a cognate ligand, such as those from the Delta family of proteins, causes intramembrane proteolysis that cleaves an intracellular fragment of the Notch protein. This intracellular fragment is a transcriptional regulator that only functions when cleaved from Notch. Cleavage may occur by sequential proteolysis by ADAM metalloprotease and the gamma-secretase complex. This intracellular fragment enters the nucleus of a cell and activates cell-cell signaling genes. In contrast to a natural Notch protein, a synNotch replaces the natural Notch intracellular fragment with one that causes a gene encoding a protein of choice, such as a CAR, to be transcribed upon release of the intracellular fragment from the synthetic transcriptional modulator.

[0620] Notch receptors have a modular domain organization. The ectodomains of Notch receptors consist of a series of N-terminal epidermal growth factor (EGF)-like repeats that are responsible for ligand binding. In synNotch receptors, the Notch ligand-binding domain is replaced with a ligand binding domain that binds a selected target ligand or antigen. The EGF repeats are followed by three LIN-12/Notch repeat (LNR) modules, which are unique to Notch receptors, and are widely reported to participate in preventing premature receptor activation. The heterodimerization (HD) domain of Notch1 is divided by furin cleavage, so that its N-terminal part terminates the extracellular subunit, and its C-terminal half constitutes the beginning of the transmembrane subunit. Following the extracellular region, the receptor has a transmembrane segment and an intracellular domain (ICD), which includes a transcriptional regulator.

[0621] Multiple forms of synthetic transcriptional modulators can be used in the methods, cells, and nucleic acids as described herein. One type of synthetic transcriptional modulator contemplated for use in the methods and cells herein comprise a heterologous extracellular ligand binding domain, a linking polypeptide having substantial sequence identity with a Notch receptor including the NRR, a TMD, and an ICD. “Fn Notch” receptors comprise a heterologous extracellular ligand binding domain, a linking polypeptide having substantial sequence identity with a Robo receptor (such as a mammalian Robo1, Robo2, Robo3, or Robo4), followed by 1, 2, or 3 fibronectin repeats (“Fn”), a TMD, and an ICD. “Mini Notch” receptors comprise a heterologous extracellular ligand binding domain, a linking polypeptide having substantial sequence identity with a Notch receptor (lacking the NRR), a TMD, and an ICD. “Minimal Linker Notch” receptors comprise a heterologous extracellular ligand binding domain, a linking polypeptide lacking substantial sequence identity with a Notch receptor (e.g., a synthetic (GGS) n polypeptide sequence), a TMD, and an ICD. “Hinge Notch” receptors comprise a heterologous extracellular ligand binding domain, a hinge sequence comprising an oligomerization domain (i.e., a domain that promotes dimerization, trimerization, or higher order multimerization with a synthetic receptor and/or an existing host receptor), a TMD, and an ICD. All of these receptor classes are synthetic, recombinant, and do not occur in nature. In some embodiments, the non-naturally occurring receptors disclosed herein bind a target cell-surface displayed ligand, which triggers proteolytic cleavage of the receptors and release of a transcriptional regulator that modulates a custom transcriptional program in the cell. In some embodiments, the synthetic transcriptional modulator does not include a LIN-12-Notch repeat (LNR) and/or a heterodimerization domain (HD) of a Notch receptor.

### Synthetic Transcriptional Modulator Transmembrane Domain

[0622] As described above, the synthetic transcriptional modulator comprises a transmembrane domain (TMD) comprising one or more ligand-inducible proteolytic cleavage sites. In some embodiments, the TMD comprises a Notch1 transmembrane domain. In some embodiments, the transmembrane domain comprises the sequence as set forth in SEQ ID NO: 828.

[0623] Generally, the TMD suitable for the chimeric receptors disclosed herein can be any transmembrane domain of a Type 1 transmembrane receptor including at least one gamma-secretase cleavage site. Detailed description of the structure and function of the gamma-secretase complex as well as its substrate proteins, including amyloid precursor protein (APP) and Notch, can, for example, be found in a recent review by Zhang et al, Frontiers Cell Neurosci (2014). Non limiting suitable TMDs from Type 1 transmembrane receptors include those from CLSTN1, CLSTN2, APLP1, APLP2, LRP8, APP, BTC, TGBR3, SPN, CD44, CSF1R, CXCL16, CX3CL1, DCC, DLL1, DSG2, DAG1, CDH1, EPCAM, EPHA4, EPHB2, EFNB1, EFNB2, ErbB4, GHR, HLA-A, and IFNAR2, wherein the TMD includes at least one gamma secretase cleavage site. Additional TMDs suitable for the compositions and methods described herein include, but are not limited to, transmembrane domains from Type 1 transmembrane receptors ILIR1, IL1R2, IL6R, INSR, ERN1, ERN2, JAG2, KCNE1, KCNE2, KCNE3, KCNE4, KL, CHL1, PTPRF, SCN1B, SCN3B, NPR3, NGFR, PLXDC2, PAM, AGER, ROBO1, SORCS3, SORCS1, SORL1, SDC1, SDC2, SPN, TYR, TYRP1, DCT, YASN, FLT1, CDH5, PKHD1, NECTIN1, PCDHGC3, NRG1, LRP1B, CDH2, NRG2, PTPRK, SCN2B, Nradd, and PTPRM. In some embodiments, the TMD of the chimeric polypeptides or Notch receptors of the disclosure is a TMD derived from the TMD of a member of the calsyntenin family, such as, alcadein alpha and alcadein gamma. In some embodiments, the TMD of the chimeric polypeptides or Notch receptors of the disclosure is a TMD known for Notch receptors. In some embodiments, the TMD of the chimeric polypeptides or Notch receptors of the disclosure is a TMD derived from a different Notch receptor. For example, in a Mini Notch based on human Notch1, the Notch1 TMD can be substituted with a Notch2 TMD, Notch3 TMD, Notch4 TMD, or a Notch TMD from a non-human animal such as Danio rerio, Drosophila melanogaster, Xenopus laevis, or Gallus gallus.

[0624] In some embodiments, the synthetic transcriptional modulator comprises a Notch cleavage site, such as S2 or S3. Additional proteolytic cleavage sites suitable for the compositions and methods disclosed herein include, but are not limited to, ADAM10, a metalloproteinase cleavage site for a MMP selected from collagenase-1, -2, and -3 (MMP-1, -8, and -13), gelatinase A and B (MMP-2 and -9), stromelysin 1, 2, and 3 (MMP-3, -10, and -11), matrilysin (MMP-7), and membrane metalloproteinases (MT1-MMP and MT2-MMP). Another example of a suitable protease cleavage site is a plasminogen activator cleavage site, e.g., a urokinase plasminogen activator (uPA) or a tissue plasminogen activator (tPA) cleavage site. Another example of a suitable protease cleavage site is a prolactin cleavage site. Specific examples of cleavage sequences of uPA and tPA include sequences comprising Val-Gly-Arg. Another example of a protease cleavage site that can be included in a proteolytically cleavable linker is a tobacco etch vims (TEV) protease cleavage site, e.g., Glu-Asn-Leu-Tyr-Thr-Gln-Ser (SEQ ID NO: 833), where the protease cleaves between the glutamine and the serine. Another example of a protease cleavage site that can be included in a proteolytically cleavable linker is an enterokinase cleavage site, e.g., Asp-Asp-Asp-Asp-Lys (SEQ ID NO: 834), where cleavage occurs after the lysine residue. Another example of a protease cleavage site that can be included in a proteolytically cleavable linker is a thrombin cleavage site, e.g., Leu-Val-Pro-Arg (SEQ ID NO: 835). Additional suitable linkers comprising protease cleavage sites include sequences cleavable by the following proteases: a PreScission™ protease (a fusion protein comprising human rhinovirus 3C protease and glutathione-S-transferase), a thrombin, cathepsin B, Epstein-Barr vims proteas, MMP-3 (stromelysin), MMP-7 (matrilysin), MMP-9; thermolysin-like MMP, matrix metalloproteinase 2 (MMP-2), cathepsin L; cathepsin D, matrix metalloproteinase 1 (MMP-1), urokinase-type plasminogen activator, membrane type 1 matrixmetalloprotemase (MT-MMP), stromelysin 3 (or MMP-11), thermo lysin, fibroblast collagenase and stromelysin-1, matrix metalloproteinase 13 (collagenase-3), tissue-type plasminogen activator (tPA), human prostate-specific antigen, kallikrein (hK3), neutrophil elastase, and calpain (calcium activated neutral protease). Proteases that are not native to the host cell in which the receptor is expressed (for example, TEV) can be used as a further regulatory mechanism, in which activation of the receptor is reduced until the protease is expressed or otherwise provided. Additionally, a protease may be tumor-associated or disease-associated (expressed to a significantly higher degree than in normal tissue), and serve as an independent regulatory mechanism. For example, some matrix metalloproteases are highly expressed in certain cancer types.

[0625] In some embodiments, the amino acid substitution(s) within the TMD includes one or more substitutions within a “GV” motif of the TMD. In some embodiments, at least one of such substitution(s) comprises a substitution to alanine. Additional sequences and substitutions are described in WO2021061872, hereby incorporated by reference in its entirety.

### Synthetic Transcriptional Modulator Intracellular Domain

[0626] In some embodiments, the synthetic transcriptional modulator comprises one or more intracellular domains from or derived from a transcriptional regulator and/or a DNA-binding domain. In some embodiments, the intracellular domain comprises means for modulating transcription of one or more genes. In some embodiments, the means for means for modulating transcription of one or more genes comprises a transcriptional regulator, e.g., a transcriptional regulator provided herein or an equivalent thereof. In some embodiments, the intracellular domain comprises an HNF1α/p65 domain or a Gal4/VP64 domain. In some embodiments, the intracellular domain comprises a human or humanized intracellular domain. In some embodiments, the intracellular domain comprises the sequence as set forth in SEQ ID NO: 832.

[0627] Transcriptional regulators either activate or repress transcription from cognate promoters. Transcriptional activators typically bind nearby to transcriptional promoters and recruit RNA polymerase to directly initiate transcription. Transcriptional repressors bind to transcriptional promoters and sterically hinder transcriptional initiation by RNA polymerase. Other transcriptional regulators serve as either an activator or a repressor depending on where it binds and cellular conditions. Accordingly, as used herein, a “transcriptional activation domain” refers to the domain of a transcription factor that interacts with transcriptional control elements and/or transcriptional regulatory proteins (i.e., transcription factors, RNA polymerases, etc.) to increase and/or activate transcription of one or more genes. Non-limiting examples of transcriptional activation domains include: a herpes simplex virus VP16 activation domain, VP64 (which is a tetrameric derivative of VP16), HIV TAT, a NFkB p65 activation domain, p53 activation domains 1 and 2, a CREB (cAMP response element binding protein) activation domain, an E2A activation domain, NFAT (nuclear factor of activated T-cells) activation domain, yeast Gal4, yeast GCN4, yeast HAP1, MLL, RTG3, GLN3, OAF1, PIP2, PDR1, PDR3, PHO4, LEU3 glucocorticoid receptor transcription activation domain, B-cell POU homeodomain protein Oct2, plant Ap2, or any others known to one or ordinary skill in the art. In some embodiments, the transcriptional regulator is selected from Gal4-VP16, Gal4-VP64, tetR-VP64, ZFHD1-YP64, Gal4-KRAB, and HAP1-VP16. In some embodiments, the transcriptional regulator is Gal4-VP64. A transcriptional activation domain can comprise a wild-type or naturally occurring sequence, or it can be a modified, mutant, or derivative version of the original transcriptional activation domain that has the desired ability to increase and/or activate transcription of one or more genes. In some embodiments, the transcriptional regulator can further include a nuclear localization signal.

[0628] In some embodiments, the synthetic transcriptional modulator comprises one or more intracellular “DNA-binding domains” (or “DB domains”). Such “DNA-binding domains” refer to sequence-specific DNA binding domains that bind a particular DNA sequence element. Accordingly, as used herein, a “sequence-specific DNA-binding domain” refers to a protein domain portion that has the ability to selectively bind DNA having a specific, predetermined sequence. A sequence-specific DNA binding domain can comprise a wild-type or naturally occurring sequence, or it can be a modified, mutant, or derivative version of the original domain that has the desired ability to bind to a desired sequence. In some embodiments, the sequence-specific DNA binding domain is engineered to bind a desired sequence. Non-limiting examples of proteins having sequence-specific DNA binding domains that can be used in synthetic proteins described herein include HNF1a, Gal4, GCN4, reverse tetracycline receptor, THY1, SYN1, NSE/RU5′, AGRP, CALB2, CAMK2A, CCK, CHAT, DLX6A, EMX1, zinc finger proteins or domains thereof, CRISPR/Cas proteins, such as Cas9, Cas3, Cas4, Cas5, Cas5e (or CasD), Cash, Cas6e, Casof, Cas7, Cas8a1, Cas8a2, Cas8b, Cas8c, Cas10, Cas10d, CasF, CasG, CasH, Csy1, Csy2, Csy3, Csel (or CasA), Cse2 (or CasB), Cse3 (or CasE), Cse4 (or CasC), Csc1, Csc2, Csa5, Csn2, Csm2, Csm3, Csm4, Csm5, Csm6, Cmr1, Cmr3, Cmr4, Cmr5, Cmr6, Csb1, Csb2, Csb3, Csx17, Csx14, Csx10, Csx16, CsaX, Csx3, Csz1, Csx15, Csf1, Csf2, Csf3, Csf4, and Cu196, and TALEN.

[0629] In those embodiments where a CRISPR/Cas-like protein is used, the CRISPR/Cas-like protein can be a wild type CRISPR/Cas protein, a modified CRISPR/Cas protein, or a fragment of a wild type or modified CRISPR/Cas protein. The CRISPR/Cas-like protein can be modified to increase nucleic acid binding affinity and/or specificity, alter an enzymatic activity, and/or change another property of the protein. For example, nuclease (i.e., DNase, RNase) domains of the CRISPR/Cas-like protein can be modified, deleted, or inactivated. Alternatively, the CRISPR/Cas-like protein can be truncated to remove domains that are not essential for the functions of the systems described herein. For example, a CRISPR enzyme that is used as a DNA binding protein or domain thereof can be mutated with respect to a corresponding wild-type enzyme such that the mutated CRISPR or domain thereof lacks the ability to cleave a nucleic acid sequence containing a DNA binding domain target site. For example, a D10A mutation can be combined with one or more of H840A, N854A, or N863A mutations to produce a Cas9 enzyme substantially lacking all DNA cleavage activity.

### Synthetic Transcriptional Modulator Juxtamembrane Domain

[0630] The ECD and the TMD, or the TMD and the ICD, can be linked to each other with a linking polypeptide, such as a juxtamembrane domain. SynNotches comprise a heterologous extracellular ligand-binding domain, a linking polypeptide having substantial sequence identity with a Notch receptor JMD (including the NRR), a TMD, and an ICD. “Fn Notch” receptors comprise a heterologous extracellular ligand binding domain, a linking polypeptide having substantial sequence identity with a Robo receptor (such as a mammalian Robo1, Robo2, Robo3, or Robo4), followed by 1, 2, or 3 fibronectin repeats (“Fn”), a TMD, and an ICD. “Mini Notch” receptors comprise a heterologous extracellular ligand binding domain, a linking polypeptide having substantial sequence identity with a Notch receptor JMD but lacking the NRR (the LIN-12-Notch repeat (LNR) modules, and the heterodimerization domain), a TMD, and an ICD. “Minimal Linker Notch” receptors comprise a heterologous extracellular ligand-binding domain, a linking polypeptide lacking substantial sequence identity with a Notch receptor (for example, without limitation, having a synthetic (GGS) n polypeptide sequence), a TMD, and an ICD. “Hinge Notch” receptors comprise a heterologous extracellular ligand-binding domain, a hinge sequence comprising an oligomerization domain (i.e., a domain that promotes dimerization, trimerization, or higher order multimerization with a synthetic receptor and/or an existing host receptor), a TMD, and an ICD.

[0631] In some embodiments, the synthetic transcriptional modulator comprises a juxtamembrane domain (JMD) peptide in between the extracellular domain and the transmembrane domain. In some embodiments, the synthetic transcriptional modulator comprises a juxtamembrane domain (JMD) peptide in between the transmembrane domain and the intracellular domain. In some embodiments, the JMD peptide comprises an LWF motif. The use of LWF motifs in receptor constructs is described in U.S. Pat. No. 10,858,443, hereby incorporated by reference in its entirety. In some embodiments, the JMD peptide has substantial sequence identity to the JMD of Notch1, Notch2, Notch3, and/or Notch4. In some embodiments, the JMD peptide has substantial sequence identity to the Notch1, Notch2, Notch3, and/or Notch4 JMD, but does not include a LIN-12-Notch repeat (LNR) and/or a heterodimerization domain (HD) of a Notch receptor. In some embodiments, the JMD peptide does not have substantial sequence identity to the Notch1, Notch2, Notch3, and/or Notch4 JMD. In some embodiments, the JMD peptide includes an oligomerization domain which promotes formation of dimers, trimers, or higher order assemblages of the receptor. Such JMD peptides are described in WO2021061872, hereby incorporated by reference in its entirety.

[0632] In the Mini Notch receptor, the linking polypeptide is derived from a Notch JMD sequence after deletion of the NRR and HD domain. The Notch JMD sequence may be the sequence from Notch1, Notch2, Notch3, or Notch4, and can be derived from a non-human homolog, such as those from Drosophila, Gallus, Danio, and the like. Four to 50 amino acid residues of the remaining Notch sequence can be used as a polypeptide linker. In some embodiments, the length and amino acid composition of the linker polypeptide sequence are varied to alter the orientation and/or proximity of the ECD and the TMD relative to one another to achieve a desired activity of the chimeric polypeptide, such as the signal transduction level when ligand induced or in the absence of ligand.

[0633] In the Minimal Linker Notch receptor, the linking polypeptide does not have substantial sequence identity to a Notch JMD sequence, including the Notch JMD sequence from Notch1, Notch2, Notch3, or Notch4, or a non-human homolog thereof. Four to 50 amino acid residues can be used as a polypeptide linker. In some embodiments, the length and amino acid composition of the linker polypeptide sequence are varied to alter the orientation and/or proximity of the ECD and the TMD relative to one another to achieve a desired activity of the chimeric polypeptide of the disclosure. The Minimal Linker sequence can be designed to include or omit a protease cleavage site, and can include or omit a glycosylation site or sites for other types of post-translational modification. In some embodiments, the Minimal Linker does not comprise a protease cleavage site or a glycosylation site.

[0634] In some embodiments, the synthetic transcriptional modulator further comprises a hinge. Hinge linkers that can be used in the synthetic transcriptional modulator can include an oligomerization domain (e.g., a hinge domain) containing one or more polypeptide motifs that promote oligomer formation of the chimeric polypeptides via intermolecular disulfide bonding. In these instances, within the chimeric receptors disclosed herein, the hinge domain generally includes a flexible polypeptide connector region disposed between the ECD and the TMD. Thus, the hinge domain provides flexibility between the ECD and TMD and also provides sites for intermolecular disulfide bonding between two or more chimeric polypeptide monomers to form an oligomeric complex. In some embodiments, the hinge domain includes motifs that promote dimer formation of the chimeric polypeptides disclosed herein. In some embodiments, the hinge domain includes motifs that promote trimer formation of the chimeric polypeptides disclosed herein (e.g., a hinge domain derived from OX40). Hinge polypeptide sequences suitable for the compositions and methods of the disclosure can be naturally-occurring hinge polypeptide sequences (e.g., those from naturally-occurring immunoglobulins) or can be engineered, designed, or modified so as to provide desired and/or improved properties, e.g., modulating transcription. Suitable hinge polypeptide sequences include, but are not limited to, those derived from IgA, IgD, and IgG subclasses, such as IgG1 hinge domain, IgG2 hinge domain, IgG3 hinge domain, and IgG4 hinge domain, or a functional variant thereof. In some embodiments, the hinge polypeptide sequence contains one or more CXXC motifs. In some embodiments, the hinge polypeptide sequence contains one or more CPPC motifs (SEQ ID NO: 836).

[0635] Hinge polypeptide sequences can also be derived from a CD8α hinge domain, a CD28 hinge domain, a CD152 hinge domain, a PD-1 hinge domain, a CTLA4 hinge domain, an OX40 hinge domain, and functional variants thereof. In some embodiments, the hinge domain includes a hinge polypeptide sequence derived from a CD8 α hinge domain or a functional variant thereof. In some embodiments, the hinge domain includes a hinge polypeptide sequence derived from a CD28 hinge domain or a functional variant thereof. In some embodiments, the hinge domain includes a hinge polypeptide sequence derived from an OX40 hinge domain or a functional variant thereof. In some embodiments, the hinge domain includes a hinge polypeptide sequence derived from an IgG4 hinge domain or a functional variant thereof.

[0636] The Fn Notch linking polypeptide is derived from the Robo1 JMD, which contains a fibronectin repeat (Fn) domain, with a short polypeptide sequence between the Fn repeats and the TMD. The Fn Notch linking polypeptide does not contain a Notch negative regulatory region (NRR), or the Notch HD domain. The Fn linking polypeptide can contain 1, 2, 3, 4, or 5 Fn repeats. In some embodiments, the chimeric receptor comprises a Fn linking polypeptide having about 1 to about 5 Fn repeats, about 1 to about 3 Fn repeats, or about 2 to about 3 Fn repeats. The short polypeptide sequence between the Fn repeats and the TMD can be from about 2 to about 30 amino acid residues. In some embodiments, the short polypeptide sequence can be between about 5 and about 20 amino acids, of any sequence. In some embodiments, the short polypeptide sequence can be between about 5 and about 20 naturally-occurring amino acids, of any sequence. In some embodiments, the short polypeptide sequence can be between about 5 and about 20 amino acids, of any sequence but having no more than one proline. In some embodiments, the short polypeptide sequence can be between about 5 and about 20 amino acids, and about 50% or more of the amino acids are glycine. In some embodiments, the short polypeptide sequence can be between about 5 and about 20 amino acids, where the amino acids are selected from glycine, serine, threonine, and alanine. In some embodiments, the length and amino acid composition of the Fn linking polypeptide sequence can be varied to alter the orientation and/or proximity of the ECD and the TMD relative to one another to achieve a desired activity of the chimeric polypeptide of the disclosure.

### Synthetic Transcriptional Modulator Stop-Transfer Sequence

[0637] In some embodiments, the synthetic transcriptional modulator further comprises a stop-transfer sequence (STS) in between the transmembrane domain and the intracellular domains. The STS comprises a charged, lipophobic sequence. Without being bound by any theory, the STS serves as a membrane anchor, and is believed to prevent passage of the intracellular domain into the plasma membrane. The use of STS domains in synthetic transcriptional modulators is described in WO2021061872, hereby incorporated by reference in its entirety. Non-limiting exemplary STS sequences include APLP1, APLP2, APP, TGBR3, CSF1R, CXCL16, CX3CL1, DAG1, DCC, DNER, DSG2, CDH1, GHR, HLA-A, IFNAR2, IGF1R, IL1R1, ERN2, KCNE1, KCNE2, CHL1, LRP1, LRP2, LRP18, PTPRF, SCN1B, SCN3B, NPR3, NGFR, PLXDC2, PAM, AGER, ROBO1, SORCS3, SORCS1, SORL1, SDC1, SDC2, SPN, TYR, TYRP1, DCT, VASN, FLT1, CDH5, PKTFD1, NECTIN1, KL, IL6R, EFNB1, CD44, CLSTN1, LRP8, PCDHGC3, NRG1, LRP1B, JAG2, EFNB2, DLL1, CLSTN2, EPCAM, ErbB4, KCNE3, CDH2, NRG2, PTPRK, BTC, EPHA4, IL1R2, KCNE4, SCN2B, Nradd, PTPRM, Notch1, Notch2, Notch3, and Notch4 STS sequences. In some embodiments, the STS is heterologous to the transmembrane domain. In some embodiments, the STS is homologous to the transmembrane domain. STS sequences are described in WO2021061872, hereby incorporated by reference in its entirety.

[0638] In some embodiments, the stop-transfer-sequence comprises the sequence as set forth in SEQ ID NO: 829.

[0639] Exemplary sequences of synthetic transcriptional modulator components are provided in Table 15.

TABLE 15
Synthetic Transcriptional Modulator/Priming Receptor (PrimeR) Components

| Component | Sequence |
|---|---|
| primeR CD8 Hinge #2 | TTTPAPRPPTPAPTIASQPLSLRPEAC (SEQ ID NO: 827) |
| primeR transmembrane | FMYVAAAAFVLLFFVGCGVLLS (SEQ ID NO: 828) |
| domain | |
| primeR Stop-Transfer- | RKRRRQHGQLWFPEGFKVSEASKKKRREPLGEDSVGLKPLKNA (SEQ ID NO: 829) |
| Sequence (JMD) | |
| primeR HNF1α DNA- | MVSKLSQLQTELLAALLESGLSKEALLQALGEPGPYLLAGEGPLDKGESCGGGRGEL |
| Binding Domain | AELPNGLGETRGSEDETDDDGEDFTPPILKELENLSPEEAAHQKAVVETLLQEDPWR |
| | VAKMVKSYLQQHNIPQREVVDTTGLNQSHLSQHLNKGTPMKTQKRAALYTWYVRKQR |
| | EVAQQFTHAGQGGLIEEPTGDELPTKKGRRNRFKWGPASQQILFQAYERQKNPSKEE |
| | RETLVEECNRAECIQRGVSPSQAQGLGSNLVTEVRVYNWFANRRKEEAFRHKLAM |
| | (SEQ ID NO: 830) |
| primeR p65 Trans- | DEFPTMVFPSGQISQASALAPAPPQVLPQAPAPAPAPAMVSALAQAPAPVPVLAPGP |
| Activation Domain | PQAVAPPAPKPTQAGEGTLSEALLQLQFDDEDLGALLGNSTDPAVFTDLASVDNSEF |
| | QQLLNQGIPVAPHTTEPMLMEYPEAITRLVTGAQRPPDPAPAPLGAPGLPNGLLSGD |
| | EDFSSIADMDFSALLSQISS (SEQ ID NO: 831) |
| primeR HNF1a-p65 | MVSKLSQLQTELLAALLESGLSKEALLQALGEPGPYLLAGEGPLDKGESCGGGRGEL |
| Trans-Activation Domain | AELPNGLGETRGSEDETDDDGEDFTPPILKELENLSPEEAAHQKAVVETLLQEDPWR |
| | VAKMVKSYLQQHNIPQREVVDTTGLNQSHLSQHLNKGTPMKTQKRAALYTWYVRKQR |
| | EVAQQFTHAGQGGLIEEPTGDELPTKKGRRNRFKWGPASQQILFQAYERQKNPSKEE |
| | RETLVEECNRAECIQRGVSPSQAQGLGSNLVTEVRVYNWFANRRKEEAFRHKLAMTC |
| | RDEFPTMVFPSGQISQASALAPAPPQVLPQAPAPAPAPAMVSALAQAPAPVPVLAPG |
| | PPQAVAPPAPKPTQAGEGTLSEALLQLQFDDEDLGALLGNSTDPAVFTDLASVDNSE |
| | FQQLLNQGIPVAPHTTEPMLMEYPEAITRLVTGAQRPPDPAPAPLGAPGLPNGLLSG |
| | DEDESSIADMDFSALLSQISS (SEQ ID NO: 832) |

### Priming Receptors

[0640] As used herein, a “priming receptor” or “PrimeR” is a polypeptide comprising an extracellular antigen binding domain and a signaling component that relocates to the nucleus and activates an inducible promoter when the antigen binding domain binds its cognate antigen, e.g., a cognate antigen expressed on the surface of a cell.

[0641] In some aspects, a priming receptor comprises an extracellular antigen binding domain, a transmembrane domain comprising one or more ligand-inducible proteolytic cleavage sites; and an intracellular domain comprising a human or humanized transcriptional effector, wherein binding of the first antigen-binding domain to its cognate target results in cleavage at the one or more ligand-inducible proteolytic cleavage sites in the transmembrane domain. In various embodiments, the intracellular domain of the priming receptor is cleaved from the transmembrane domain upon binding of the priming receptor to the priming antigen. The intracellular domain is then capable of translocating into a cell nucleus where it induces expression of the chimeric antigen receptor.

[0642] Exemplary priming receptor (e.g., synthetic transcriptional modulators) sequences (nucleic acid and amino acid) are provided in Table 16. In some embodiments, the priming receptor is encoded by a sequence with at least 80%, 85%, 90%, 91%, 92%, 93%, 94%, 95%, 96%, 97%, 98%, 99%, or 100% identity to SEQ ID NOs: 1157, 1159, or 1161. In some embodiments, the priming receptor comprises a sequence with at least 80%, 85%, 90%, 91%, 92%, 93%, 94%, 95%, 96%, 97%, 98%, 99%, or 100% identity to SEQ ID NOs: 1158, 1160, or 1162.

TABLE 16
Exemplary Priming Receptors

| Name and | |
|---|---|
| SEQ ID NO | Sequence |
| SCL34A2 Ab | GAAATCGTCCTGACACAGTCTCCAGATTTTCAGAGCGTGACGCCAAAGGAGAAAGTGACAATTA |
| 1 (VL-VH) | CATGCCGGGCATCTCAGTCTGTTGGGTCTGGGTTGCATTGGTATCAGCAAAAGCCCGACCAGTC |
| primeR | ACCCAAACTGCTCATCAAATATGCAAGCCAGAGTTTTTCAGGCGTACCTTCACGATTTAGCGGA |
| SEQ ID NO: | AGTGGTTCTGGCACTGACTTCACCTTGACGATTAATAGCCTGGAAGTAGAAGACGCTGCCACTT |
| 1157 | TCTACTGCCTGCAAAGTAGCTCCCTGCCCTGGACTTTTGGGCAGGGTACTAAGGTCGAGATCAA |
| | GGGCTCGACAAGCGGAAGTGGCAAACCGGGCAGCGGCGAGGGAAGCACCAAGGGACAAGTGCAA |
| | CTGCAAGAGTCTGGACCCGGGCTGGTGAAACCAAGCGAGACATTATCCCTCACTTGTACCGTGT |
| | CAGGCGGTAGTGTGTCCTCCGGGAATTTCTACTGGAGTTGGATACGCCAGCCTCCTGGGAAGGG |
| | CCTTGAATGGATTGGCTACATCTACTATTCAGGCTCCACCTACTACAACCCGTCTTTGAAGTCA |
| | AGGGTTACGATAAGCGTCGATACCTCCAAAAACCAATTCTCCCTAAAGCTCAGATCGTTAACTG |
| | CCGCTGATACCGCGGTGTACTATTGTGCCCGTTGGATGACCAAAGTTAAGGGTTATTTCGACTA |
| | TTGGGGACAAGGGACACTTGTCACCGTGTCCTCCGCAACCAcgacgccagcgccgcgaccacca |
| | acaccggcgcccaccatcgcgtcgcagcccctgtccctgcgcccTgaggcgtgcttcatgtacg |
| | tggcggcggccgcctttgtgcttctgttcttcgtgggctgcggggtgctgctgtcccgtaaacg |
| | Cagacgtcaacacggtcaactgtggtttccagaaggttttaaggtctccgaagcaagtaagaag |
| | aaaagacgtgaaccactgggagaagatagcgtcggtctgaaaccactcaagaatgccatggttt |
| | ctaaactgagccagctgcagacggagctcctggcggccctgctggagtcagggctgagcaaaga |
| | ggcactgctccaggcactgggCgagccggggccctacctcctggctggagaaggccccctggac |
| | aagggggagtcctgcggcggcggtcgaggggagctggctgagctgcccaatgggctgggggaga |
| | ctcggggctccgaggacgagacCgacgacgatggggaagacttcacgccacccatcctcaaaga |
| | gctggagaacctcagccctgaggaggcggcccaccagaaagccgtggtggagacccttctgcag |
| | gaggacccgtggcgtgtggcgaagatggtcaagtcctacctgcagcagcacaacatcccacagc |
| | gggaggtggtcgataccactggcctcaaccagtcccacctgtcccaacacctcaacaagggcac |
| | tcccatgaagacgcagaagcgggccgccctgtacacctggtaTgtccgcaagcagcgagaggtg |
| | gcgcagcagttcacccatgcagggcagggagggctgattgaAgaGcccacaggAgatgagctac |
| | caaccaagaaggggcggaggaaccgtttcaagtggggcccagcatcccagcagatcctgttcca |
| | ggcctatgagaggcagaagaaccctagcaaggaggagcgagaAacgctagtggaggagtgcaat |
| | agggcggaatgcatccagagaggTgtgtcAccatcacaAgcacaAggTctgggctccaacctcg |
| | tcacggaggtgcgtgtctacaactggtttgccaaccggcgcaaagaagaagccttccggcacaa |
| | gctggccatgacctgcagggatgagtttcccaccatggtgtttccttctgggcagatcagccag |
| | gcctcggccttggccccggcccctccccaagtcctgccccaggctccagcccctgcccctgctc |
| | cagccatggtatcagctctggcccaggccccagcccctgtcccagtcctagccccaggccctcc |
| | tcaAgctgtggccccacctgcccccaagcccacccaAgctggggaaggaacgctgtcagaggcc |
| | ctgctgcagctgcagtttgatgatgaagacctgggggccttgcttggcaacagcacagacccag |
| | ctgtgttcacagacctggcatccgtcgacaactccgagtttcagcagctgctgaaccagggcat |
| | acctgtggccccccacacaactgagcccatgctgatggagtaccctgaggctataactcgccta |
| | gtgacaggggcccagaggccccccgacccagctcctgctccactgggggccccggggctcccca |
| | atggcctcctttcaggagatgaagacttctcctccattgcggacatggacttctcagccctgct |
| | gagtcagatcagctccTAA |
| SCL34A2 Ab | EIVLTQSPDFQSVTPKEKVTITCRASQSVGSGLHWYQQKPDQSPKLLIKYASQSFSGVPSRFSG |
| 1 (VL-VH) | SGSGTDFTLTINSLEVEDAATFYCLQSSSLPWTFGQGTKVEIKGSTSGSGKPGSGEGSTKGQVQ |
| primeR | LQESGPGLVKPSETLSLTCTVSGGSVSSGNFYWSWIRQPPGKGLEWIGYIYYSGSTYYNPSLKS |
| SEQ ID NO: | RVTISVDTSKNQFSLKLRSLTAADTAVYYCARWMTKVKGYFDYWGQGTLVTVSSATTTPAPRPP |
| 1158 | TPAPTIASQPLSLRPEACEMYVAAAAFVLLFFVGCGVLLSRKRRRQHGQLWFPEGFKVSEASKK |
| | KRREPLGEDSVGLKPLKNAMVSKLSQLQTELLAALLESGLSKEALLQALGEPGPYLLAGEGPLD |
| | KGESCGGGRGELAELPNGLGETRGSEDETDDDGEDFTPPILKELENLSPEEAAHQKAVVETLLQ |
| | EDPWRVAKMVKSYLQQHNIPQREVVDTTGLNQSHLSQHLNKGTPMKTQKRAALYTWYVRKQREV |
| | AQQFTHAGQGGLIEEPTGDELPTKKGRRNRFKWGPASQQILFQAYERQKNPSKEERETLVEECN |
| | RAECIQRGVSPSQAQGLGSNLVTEVRVYNWFANRRKEEAFRHKLAMTCRDEFPTMVFPSGQISQ |
| | ASALAPAPPQVLPQAPAPAPAPAMVSALAQAPAPVPVLAPGPPQAVAPPAPKPTQAGEGTLSEA |
| | LLQLQFDDEDLGALLGNSTDPAVFTDLASVDNSEFQQLLNQGIPVAPHTTEPMLMEYPEAITRL |
| | VTGAQRPPDPAPAPLGAPGLPNGLLSGDEDESSIADMDFSALLSQISS |
| SCL34A2 Ab | GAGATAGTCCTGACCCAGTCACCCGATTTCCAGAGTGTTACTCCTAAGGAGAAAGTGACTATAA |
| 2 (VL-VH) | CATGCCGGGCATCTCAGTCTGTCGGAAGCGGGCTACATTGGTACCAGCAGAAGCCTGACCAGAG |
| primeR | CCCGAAACTGCTCATCAAATATGCCTCCCAGTCGTTTTCTGGCGTGCCCTCTCGCTTTTCCGGA |
| SEQ ID NO: | AGCGGATCTGGCACAGACTTCACCTTGACCATCAATAGCCTGGAAACTGAGGACGCCGCTACGT |
| 1159 | ATTTCTGCCAGCAGTCCTCCAGTCTGCCTTGGACATTTGGTCAGGGAACGAAGGTGGAGATCAA |
| | GGGTTCAACATCAGGGAGCGGGAAACCGGGCTCTGGCGAGGGCTCAACAAAGGGACAAGTGCAA |
| | CTGCAAGAATCGGGACCCGGGCTGGTTAAACCAAGTGAAACCCTTTCCCTCACTTGTACCGTAA |
| | GCGGCGGTAGCGTGTCCTCTGGTAGCTACTATTGGAGTTGGATTAGGCAGGCGCCAGGGAAAGG |
| | CCTCGAATGGATTGGGTATATCTACTACAGCGGCAGTAACTACTACAACCCATCATTGAAGTCT |
| | AGAGTGACAATTAGTGTCGATACCTCTAAAAATCAATTCTCACTTAAGCTGCGAGCTGTAACCG |
| | CCGCAGACACTGCGGTGTACTATTGTGCCCGTTGGATGACCACTATCAAGGGCTACTTCGATTA |
| | TTGGGGACAAGGGACATTAGTTACGGTGTCCTCCGCAACCAcgacgccagcgccgcgaccacca |
| | acaccggcgcccaccatcgcgtcgcagcccctgtccctgcgcccTgaggcgtgcttcatgtacg |
| | tggcggcggccgcctttgtgcttctgttcttcgtgggctgcggggtgctgctgtcccgtaaacg |
| | Cagacgtcaacacggtcaactgtggtttccagaaggttttaaggtctccgaagcaagtaagaag |
| | aaaagacgtgaaccactgggagaagatagcgtcggtctgaaaccactcaagaatgccatggttt |
| | ctaaactgagccagctgcagacggagctcctggcggccctgctggagtcagggctgagcaaaga |
| | ggcactgctccaggcactgggCgagccggggccctacctcctggctggagaaggccccctggac |
| | aagggggagtcctgcggcggcggtcgaggggagctggctgagctgcccaatgggctgggggaga |
| | ctcggggctccgaggacgagacCgacgacgatggggaagacttcacgccacccatcctcaaaga |
| | gctggagaacctcagccctgaggaggcggcccaccagaaagccgtggtggagacccttctgcag |
| | gaggacccgtggcgtgtggcgaagatggtcaagtcctacctgcagcagcacaacatcccacagc |
| | gggaggtggtcgataccactggcctcaaccagtcccacctgtcccaacacctcaacaagggcac |
| | tcccatgaagacgcagaagcgggccgccctgtacacctggtaTgtccgcaagcagcgagaggtg |
| | gcgcagcagttcacccatgcagggcagggagggctgattgaAgaGcccacaggAgatgagctac |
| | caaccaagaaggggcggaggaaccgtttcaagtggggcccagcatcccagcagatcctgttcca |
| | ggcctatgagaggcagaagaaccctagcaaggaggagcgagaAacgctagtggaggagtgcaat |
| | agggcggaatgcatccagagaggTgtgtcAccatcacaAgcacaAggTctgggctccaacctcg |
| | tcacggaggtgcgtgtctacaactggtttgccaaccggcgcaaagaagaagccttccggcacaa |
| | gctggccatgacctgcagggatgagtttcccaccatggtgtttccttctgggcagatcagccag |
| | gcctcggccttggccccggcccctccccaagtcctgccccaggctccagcccctgcccctgctc |
| | cagccatggtatcagctctggcccaggccccagcccctgtcccagtcctagccccaggccctcc |
| | tcaAgctgtggccccacctgcccccaagcccacccaAgctggggaaggaacgctgtcagaggcc |
| | ctgctgcagctgcagtttgatgatgaagacctgggggccttgcttggcaacagcacagacccag |
| | ctgtgttcacagacctggcatccgtcgacaactccgagtttcagcagctgctgaaccagggcat |
| | acctgtggccccccacacaactgagcccatgctgatggagtaccctgaggctataactcgccta |
| | gtgacaggggcccagaggccccccgacccagctcctgctccactgggggccccggggctcccca |
| | atggcctcctttcaggagatgaagacttctcctccattgcggacatggacttctcagccctgct |
| | gagtcagatcagctccTAA |
| SCL34A2 Ab | EIVLTQSPDFQSVTPKEKVTITCRASQSVGSGLHWYQQKPDQSPKLLIKYASQSFSGVPSRFSG |
| 2 (VL-VH) | SGSGTDFTLTINSLETEDAATYFCQQSSSLPWTFGQGTKVEIKGSTSGSGKPGSGEGSTKGQVQ |
| primeR | LQESGPGLVKPSETLSLTCTVSGGSVSSGSYYWSWIRQAPGKGLEWIGYIYYSGSNYYNPSLKS |
| SEQ ID NO: | RVTISVDTSKNQFSLKLRAVTAADTAVYYCARWMTTIKGYFDYWGQGTLVTVSSATTTPAPRPP |
| 1160 | TPAPTIASQPLSLRPEACEMYVAAAAFVLLFFVGCGVLLSRKRRRQHGQLWFPEGFKVSEASKK |
| | KRREPLGEDSVGLKPLKNAMVSKLSQLQTELLAALLESGLSKEALLQALGEPGPYLLAGEGPLD |
| | KGESCGGGRGELAELPNGLGETRGSEDETDDDGEDFTPPILKELENLSPEEAAHQKAVVETLLQ |
| | EDPWRVAKMVKSYLQQHNIPQREVVDTTGLNQSHLSQHLNKGTPMKTQKRAALYTWYVRKQREV |
| | AQQFTHAGQGGLIEEPTGDELPTKKGRRNRFKWGPASQQILFQAYERQKNPSKEERETLVEECN |
| | RAECIQRGVSPSQAQGLGSNLVTEVRVYNWFANRRKEEAFRHKLAMTCRDEFPTMVFPSGQISQ |
| | ASALAPAPPQVLPQAPAPAPAPAMVSALAQAPAPVPVLAPGPPQAVAPPAPKPTQAGEGTLSEA |
| | LLQLQFDDEDLGALLGNSTDPAVFTDLASVDNSEFQQLLNQGIPVAPHTTEPMLMEYPEAITRL |
| | VTGAQRPPDPAPAPLGAPGLPNGLLSGDEDESSIADMDFSALLSQISS |
| SCL34A2 Ab | GATATTCAGATGACACAGAGCCCAAGTTCACTGTCAGCGAGTGTCGGAGATCGGGTTACTATAA |
| 3 (VL-VH) | CCTGCCGAGCATCTCAGGATATCAATAATTACCTGGCCTGGTATCAGCAAAAACCCGGCAAAGT |
| primeR | CCCGAAGCTCCTGATATACGCAGCTTCAACACTGCAAAGCGGTGTGCCCTCGCGCTTTAGCGGC |
| SEQ ID NO: | TCTGGCAGCGGGACAGATTTCACCCTGACGATTTCCTCCCTTCAACCCGAGGACGTGGCCACTT |
| 1161 | ACTACTCCCTCAACTATTACTCTGTACCCTGGACCTTTGGCCAAGGGACAAAGGTGGAAATCAA |
| | GGGCTCTACTAGCGGTTCAGGGAAACCTGGGAGTGGAGAGGGCTCGACCAAGGGACAGGTCCAG |
| | CTCGTGGAGTCTGGCGGTGGGCTGGTTCAGCCAGGGAGGAGTTTGCGGCTTTCCTGTACGGGAA |
| | GCGGATTCACCTTTGGTGACTATGCCATGAACTGGGTCAGGCAGGCTCCTGGAAAAGGCCTAGA |
| | GTGGGTGGGTTTCATCAGAACCAAGCCATATGGCGGCACTACAGAATATGCAGCCAGCGTAAAA |
| | GGGAGATTCACGTTCAGCCGCGACGACTCTAAGTCAATAGCTTACCTTCAGATGAACTCCCTCA |
| | AGACCGAAGACACCGCCGTGTACTATTGTACTATGATCCCTGTGCTGCGTTTTTTAGAGTGGTT |
| | GCCTTGGGGACAAGGGACATTAGTTACTGTGTCCTCCGCAACCAcgacgccagcgccgcgacca |
| | ccaacaccggcgcccaccatcgcgtcgcagcccctgtccctgcgcccTgaggcgtgcttcatgt |
| | acgtggcggcggccgcctttgtgcttctgttcttcgtgggctgcggggtgctgctgtcccgtaa |
| | acgCagacgtcaacacggtcaactgtggtttccagaaggttttaaggtctccgaagcaagtaag |
| | aagaaaagacgtgaaccactgggagaagatagcgtcggtctgaaaccactcaagaatgccatgg |
| | tttctaaactgagccagctgcagacggagctcctggcggccctgctggagtcagggctgagcaa |
| | agaggcactgctccaggcactgggCgagccggggccctacctcctggctggagaaggccccctg |
| | gacaagggggagtcctgcggcggcggtcgaggggagctggctgagctgcccaatgggctggggg |
| | agactcggggctccgaggacgagacCgacgacgatggggaagacttcacgccacccatcctcaa |
| | agagctggagaacctcagccctgaggaggcggcccaccagaaagccgtggtggagacccttctg |
| | caggaggacccgtggcgtgtggcgaagatggtcaagtcctacctgcagcagcacaacatcccac |
| | agcgggaggtggtcgataccactggcctcaaccagtcccacctgtcccaacacctcaacaaggg |
| | cactcccatgaagacgcagaagcgggccgccctgtacacctggtaTgtccgcaagcagcgagag |
| | gtggcgcagcagttcacccatgcagggcagggagggctgattgaAgaGcccacaggAgatgagc |
| | taccaaccaagaaggggcggaggaaccgtttcaagtggggcccagcatcccagcagatcctgtt |
| | ccaggcctatgagaggcagaagaaccctagcaaggaggagcgagaAacgctagtggaggagtgc |
| | aatagggcggaatgcatccagagaggTgtgtcAccatcacaAgcacaAggTctgggctccaacc |
| | tcgtcacggaggtgcgtgtctacaactggtttgccaaccggcgcaaagaagaagccttccggca |
| | caagctggccatgacctgcagggatgagtttcccaccatggtgtttccttctgggcagatcagc |
| | caggcctcggccttggccccggcccctccccaagtcctgccccaggctccagcccctgcccctg |
| | ctccagccatggtatcagctctggcccaggccccagcccctgtcccagtcctagccccaggccc |
| | tcctcaAgctgtggccccacctgcccccaagcccacccaAgctggggaaggaacgctgtcagag |
| | gccctgctgcagctgcagtttgatgatgaagacctgggggccttgcttggcaacagcacagacc |
| | cagctgtgttcacagacctggcatccgtcgacaactccgagtttcagcagctgctgaaccaggg |
| | catacctgtggccccccacacaactgagcccatgctgatggagtaccctgaggctataactcgc |
| | ctagtgacaggggcccagaggccccccgacccagctcctgctccactgggggccccggggctcc |
| | ccaatggcctcctttcaggagatgaagacttctcctccattgcggacatggacttctcagccct |
| | gctgagtcagatcagctccTAA |
| SCL34A2 Ab | DIQMTQSPSSLSASVGDRVTITCRASQDINNYLAWYQQKPGKVPKLLIYAASTLQSGVPSRFSG |
| 3 (VL-VH) | SGSGTDFTLTISSLQPEDVATYYSLNYYSVPWTFGQGTKVEIKGSTSGSGKPGSGEGSTKGQVQ |
| primeR | LVESGGGLVQPGRSLRLSCTGSGFTFGDYAMNWVRQAPGKGLEWVGFIRTKPYGGTTEYAASVK |
| SEQ ID NO: | GRFTFSRDDSKSIAYLQMNSLKTEDTAVYYCTMIPVLRFLEWLPWGQGTLVTVSSATTTPAPRP |
| 1162 | PTPAPTIASQPLSLRPEACEMYVAAAAFVLLFFVGCGVLLSRKRRRQHGQLWFPEGFKVSEASK |
| | KKRREPLGEDSVGLKPLKNAMVSKLSQLQTELLAALLESGLSKEALLQALGEPGPYLLAGEGPL |
| | DKGESCGGGRGELAELPNGLGETRGSEDETDDDGEDFTPPILKELENLSPEEAAHQKAVVETLL |
| | QEDPWRVAKMVKSYLQQHNIPQREVVDTTGLNQSHLSQHLNKGTPMKTQKRAALYTWYVRKQRE |
| | VAQQFTHAGQGGLIEEPTGDELPTKKGRRNRFKWGPASQQILFQAYERQKNPSKEERETLVEEC |
| | NRAECIQRGVSPSQAQGLGSNLVTEVRVYNWFANRRKEEAFRHKLAMTCRDEFPTMVFPSGQIS |
| | QASALAPAPPQVLPQAPAPAPAPAMVSALAQAPAPVPVLAPGPPQAVAPPAPKPTQAGEGTLSE |
| | ALLQLQFDDEDLGALLGNSTDPAVFTDLASVDNSEFQQLLNQGIPVAPHTTEPMLMEYPEAITR |
| | LVTGAQRPPDPAPAPLGAPGLPNGLLSGDEDFSSIADMDFSALLSQISS |

[0643] In some embodiments, the N-terminus or C-terminus of the synthetic transcriptional modulator, such as a priming receptor, comprises a post-translation modification, such as a deletion or modification of the amino acids. For example, the first, second or third N-terminus or C-terminus amino acid can be modified or deleted in the synthetic transcriptional modulator, such as a priming receptor.

[0644] In some embodiments, the synthetic transcriptional modulator, such as a priming receptor, comprises SEQ ID NO:1158 wherein the N-terminal amino acid, the two N-terminal amino acids or the three N-terminal amino acids are different from those in SEQ ID NO: 1158, e.g., due to one or more posttranscriptional modification. In some embodiments, the synthetic transcriptional modulator, such as a priming receptor, comprises SEQ ID NO: 1158 wherein the C-terminal amino acid, the two C-terminal amino acids or the three C-terminal amino acids are different from those in SEQ ID NO: 1158, e.g., due to one or more posttranscriptional modification. In some embodiments, the synthetic transcriptional modulator, such as a priming receptor, comprises SEQ ID NO: 1160 wherein the N-terminal amino acid, the two N-terminal amino acids or the three N-terminal amino acids are different from those in SEQ ID NO: 1160, e.g., due to one or more posttranscriptional modification. In some embodiments, the synthetic transcriptional modulator, such as a priming receptor, comprises SEQ ID NO: 1160 wherein the C-terminal amino acid, the two C-terminal amino acids or the three C-terminal amino acids are different from those in SEQ ID NO: 1160, e.g., due to one or more posttranscriptional modification. In some embodiments, the synthetic transcriptional modulator, such as a priming receptor, comprises SEQ ID NO: 1162 wherein the N-terminal amino acid, the two N-terminal amino acids or the three N-terminal amino acids are different from those in SEQ ID NO: 1162, e.g., due to one or more posttranscriptional modification. In some embodiments, the synthetic transcriptional modulator, such as a priming receptor, comprises SEQ ID NO: 1162 wherein the C-terminal amino acid, the two C-terminal amino acids or the three C-terminal amino acids are different from those in SEQ ID NO: 1162, e.g., due to one or more posttranscriptional modification.

### Logic Gate Systems

[0645] Provided herein are systems, e.g., logic gates, that induce killing, or cytolysis, of target cells and/or tissues expressing both TMPRSS4 and SLC34A2. In some embodiments, the target cells are in tumors or cancers. In some embodiments, the tissues are tumors or cancers. It has been discovered that making a T cell dependent on expression of both of these antigens improves tumor cell and/or tissue targeting specificity. Accordingly, provided herein are cells, e.g., immune cells such as T cells that are modified to target and kill cells and/or tissues that express TMPRSS4 or both TMPRSS4 and SLC34A2. In some embodiments, the target cell is a cancer cell. In some embodiments, the target tissues are tumors or cancers. In some embodiments a cell, e.g., an immune cell such as a T cell, is engineered to express a logic gate, e.g., an IF_THEN logic gate or an AND logic gate, comprising cell surface receptors to TMPRSS4 and SLC34A2. Exemplary engineered cells, e.g., T cells, comprise a first receptor that binds specifically to TMPRSS4 on the surface of a target cell, e.g., a cancer cell, which, when bound to TMPRSS4, induces the expression of a second receptor that binds specifically to SLC34A2 on the surface of the target cell, which second receptor triggers the killing or cytolysis of the target cell. Exemplary engineered cells, e.g., T cells, comprise a first receptor that binds specifically to SLC34A2 on the surface of a target cell, e.g., a cancer cell, which, when bound to SLC34A2, induces the expression of a second receptor that binds specifically to TMPRSS4 on the surface of the target cell, which second receptor triggers the killing or cytolysis of the target cell. The second receptor can be a chimeric antigen receptor.

[0646] In various embodiments, provided herein are polypeptide systems comprising a priming receptor (primeR) that binds to a first target antigen and a chimeric antigen receptor that binds to a second antigen. In some embodiments, the CAR antigen is TMPRSS4 and the priming receptor antigen is not TMPRSS4. In some embodiments, the CAR antigen is TMPRSS4 and the priming receptor antigen is SLC34A2. Such systems are alternatively termed “logic gates” or “circuits.”

[0647] As used herein, a “logic gate,” “circuit,” “circuit receptor,” “system” or “system receptor” refers to a two part or more polypeptide or polypeptide expression system comprising, e.g., a synthetic transcriptional activator such as a priming receptor, and a CAR, wherein one or more of the polypeptide(s) is dependent on the activity of another of the polypeptide(s) for activity or expression. In some embodiments, the polypeptide system comprises at least a first polypeptide comprising a synthetic transcriptional activator such as a priming receptor, and at least a second polypeptide comprising a CAR. The polypeptide expression system can be encoded on at least one nucleic acid inserted into a cell, where the synthetic transcriptional activator such as a priming receptor and the CAR are expressed in the cell. One or more suppressors of gene expression (e.g., an sgRNA or an shRNA) can also be employed to enhance expansion and activity of logic gate-expressing T cells (LG T cells or integrated circuit T (ICT) cells).

[0648] In various embodiments, the system comprises 4 steps leading to T cell activation: (1) the priming receptor (primeR) is constitutively expressed; (2) the priming receptor is triggered, resulting in cleavage of the intracellular domain; (3) the cleaved priming receptor intracellular domain induces expression of the CAR; and (4) the CAR is activated, resulting in T cell activation.

[0649] In some aspects, the system is encoded by nucleic acid transgenes inserted into an immune cell. The system can be encoded on a single nucleic acid insert or fragment that comprises both transgenes, or can be encoded on two nucleic acids that encode the system transgenes individually. The priming receptor and CAR of the system can be placed in any order on the single nucleic acid. For example, the priming receptor can be at the 5′ end and the CAR can be at the 3′ end or the CAR can be at the 5′ end and the primeR can be at the 3′ end.

[0650] A constitutive promoter can be operably linked to the nucleotide sequence encoding the priming receptor. An inducible promoter can also be operably linked to the nucleotide sequence encoding the CAR. In some embodiments, when the system is encoded on a single nucleic acid insert or fragment that comprises both transgenes, the nucleic acid can comprise, in a 5′ to 3′ direction, the constitutive promoter; the nucleotide sequence encoding the priming receptor; the inducible promoter; and the nucleotide sequence encoding the CAR. Alternatively, the nucleic acid can comprise, in a 5′ to 3′ direction, the inducible promoter; the nucleotide sequence encoding CAR; the constitutive promoter; and the nucleotide sequence encoding priming receptor. The one or more suppressors of gene expression, if present, can be present upstream or downstream of the primeR and/or the CAR.

[0651] Non-limiting examples of suitable promoters include constitutive and inducible promoters, such as EF1α or inducible Hepatocyte Nuclear Factor 1α (HNF1α)-YB TATA or RNA polymerase II (pol II)-based promoters. In some embodiments, the constitutive promoter is EF1α. In some embodiments, the EF1α promoter comprises as sequence as set forth in SEQ ID NO: 991. Non-limiting examples of suitable promoters further include the tetracycline inducible or repressible promoter, RNA polymerase I or III-based promoters, the pol II dependent viral promoters, such as the CMV-IE promoter, and the pol III U6 and H1 promoters, as well as Hepatocyte Nuclear Factor 1α (HNF1α)-YB TATA promotor provided in SEQ ID NO: 992. Table 17 provides the sequences of exemplary promoters.

TABLE 17
Exemplary Promoters

| Name | Sequence |
|---|---|
| EF1α promoter | GGATCTGCGATCGCTCCGGTGCCCGTCAGTGGGCAGAGCGCACATCGCCCACAG |
| (SEQ ID NO: | TCCCCGAGAAGTTGGGGGGAGGGGTCGGCAATTGAACGGGTGCCTAGAGAAGGT |
| 991) | GGCGCGGGGTAAACTGGGAAAGTGATGTCGTGTACTGGCTCCGCCTTTTTCCCG |
| | AGGGTGGGGGAGAACCGTATATAAGTGCAGTAGTCGCCGTGAACGTTCTTTTTC |
| | GCAACGGGTTTGCCGCCAGAACACAGCTGAAGCTTCGAGGGGCTCGCATCTCTC |
| | CTTCACGCGCCCGCCGCCCTACCTGAGGCCGCCATCCACGCCGGTTGAGTCGCG |
| | TTCTGCCGCCTCCCGCCTGTGGTGCCTCCTGAACTGCGTCCGCCGTCTAG |
| HNF1α response | gttaataattaacatatatgttaatcattaacatatagttaattattaaccgct |
| elements | atgttaatgattaacaacggttaataattaacatatatgttaatcattaacata |
| (SEQ ID NO: | ta |
| 1245) | |
| YB TATA | tctagagggtatataatgggggcca |
| promoter (SEQ ID | |
| NO: 1246) | |
| HNF1α-YB | gttaataattaacatatatgttaatcattaacatatagttaattattaaccgct |
| TATA inducible | atgttaatgattaacaacggttaataattaacatatatgttaatcattaacata |
| promoter | taactagtctagagggtatataatgggggcca |
| (SEQ ID NO: | |
| 992) | |

[0652] In some aspects, the system is encoded by a nucleic acid comprising a sequence with at least 80%, 85%, 90%, 91%, 92%, 93%, 94%, 95%, 96%, 97%, 98%, 99%, or 100% identity to a sequence comprising nucleotides 481-7257 of SEQ ID NO: 1120; a sequence with at least 80%, 85%, 90%, 91%, 92%, 93%, 94%, 95%, 96%, 97%, 98%, 99%, or 100% identity to a sequence comprising nucleotides 481-7239 of SEQ ID NO: 1121; a sequence with at least 80%, 85%, 90%, 91%, 92%, 93%, 94%, 95%, 96%, 97%, 98%, 99%, or 100% identity to a sequence comprising nucleotides 481-7621 of SEQ ID NO: 1122; a sequence with at least 80%, 85%, 90%, 91%, 92%, 93%, 94%, 95%, 96%, 97%, 98%, 99%, or 100% identity to a sequence comprising nucleotides 481-7636 of SEQ ID NO: 1123; or a sequence with at least 80%, 85%, 90%, 91%, 92%, 93%, 94%, 95%, 96%, 97%, 98%, 99%, or 100% identity to a sequence comprising nucleotides 481-7621 of SEQ ID NO: 1124. In some aspects, the system is encoded by a nucleic acid comprising a sequence with at least 80%, 85%, 90%, 91%, 92%, 93%, 94%, 95%, 96%, 97%, 98%, 99%, or 100% identity to a sequence comprising SEQ ID NO: 1238; a sequence with at least 80%, 85%, 90%, 91%, 92%, 93%, 94%, 95%, 96%, 97%, 98%, 99%, or 100% identity to a sequence comprising SEQ ID NO: 1239; a sequence with at least 80%, 85%, 90%, 91%, 92%, 93%, 94%, 95%, 96%, 97%, 98%, 99%, or 100% identity to a sequence comprising SEQ ID NO: 1240; a sequence with at least 80%, 85%, 90%, 91%, 92%, 93%, 94%, 95%, 96%, 97%, 98%, 99%, or 100% identity to a sequence comprising SEQ ID NO: 1241; or a sequence with at least 80%, 85%, 90%, 91%, 92%, 93%, 94%, 95%, 96%, 97%, 98%, 99%, or 100% identity to a sequence comprising SEQ ID NO: 1242.

[0653] In some aspects, the system is encoded by a nucleic acid comprising a sequence with at least 80%, 85%, 90%, 91%, 92%, 93%, 94%, 95%, 96%, 97%, 98%, 99%, or 100% identity to a sequence selected from the group consisting of the sequences set forth in SEQ ID NOs: 1120, 1121, 1122, 1123, 1124, 1238, 1239, 1240, 1241, or 1242.

[0654] Exemplary nucleic acids or expression plasmids encoding logic gate systems are provided in SEQ ID NOS: 1120, 1121, 1122, 1123, 1124, 1238, 1239, 1240, 1241, or 1242. Such exemplary nucleic acids or expression plasmids encoding logic gate systems include 5′ and 3′ nucleotides encoding a homology wing and sgRNA target sequence for cleavage of the expression plasmid and homology mediated insertion of the logic gate-encoding DNA into a cell genome (e.g., the 480 5′ nucleotides and the 473 3′ nucleotides of SEQ ID NOs: 1120, 1121, 1122, 1123, or 1124). An exemplary 5′ homology wing is provided in SEQ ID NO: 1235, and an exemplary 3′ homology wing is provided in SEQ ID NO: 1236.

[0655] Exemplary systems are provided in Table 18. In some aspects, the system is encoded by a nucleic acid comprising a sequence with at least 80%, 85%, 90%, 91%, 92%, 93%, 94%, 95%, 96%, 97%, 98%, 99%, or 100% identity to a sequence selected from the group provided in Table 18.

TABLE 18
Exemplary Logic Gate systems

| Name | Sequence |
|---|---|
| LG 219 | GAGCCATGCTTGGCTTACGAGGGCGACCAACCCATCAAACTCCCCGCCCCCAGCACTTTTATTTCTCCTC |
| (with | TTTAGGAAGTACACTTCAGTATCTTTGGCACAGTGCATGAGCACGACTAAAGTAAAACATCGCAGAAAAC |
| sgRNA | ATAGCTTTAGTCTACCCTTCGTGTCCTAAAAGGAAAACCAGTAGCTTCCCAGGCCACCGGAAGGGCAACA |
| and | CATGTCCTCTGCAGTTTCTGCACACGGGAAGGTAAAGACAGAGAGAGGACCTACTCCTCAACACAGAAAC |
| homology | ATTTCAAAATCTTTCCTCGCCTGCAACCCAAGCTGAAGTCATTCTCCCCAGAAATAACAAAAGTTGGAAG |
| wings) | AGAAGCCGGAGACAGGATAGGTGCAGGAAGCCCACACTTTGAGGGCAGCACTCAGACACCCTCTCCTGTG |
| SEQ ID | TGCAGGACGTGCCGAATGTTCAGGTGCAATGAGAATGAGCCATGCttggcttataaggtacgactgtgcc |
| NO: 1120 | ttctagttgccagccatctgttgtttgcccctcccccgtgccttccttgaccctggaaggtgccactccc |
| | actgtcctttcctaataaaatgaggaaattgcatcgcattgtctgagtaggtgtcattctattctggggg |
| | gtggggtggggcaggacagcaagggggaggattgggaagacaatagcaggcatgctggggatgcggtggg |
| | ctctatgggataagcttgatatcgaattcatcgatgttaataattaacatatatgttaatcattaacata |
| | tagttaattattaaccgctatgttaatgattaacaacggttaataattaacatatatgttaatcattaac |
| | atataactagtctagagggtatataatgggggccactagtctactaccagagTtcatcgctagcgctacc |
| | ggatccgccaccATGGCCCTGCCAGTAACGGCTCTGCTGCTGCCACTTGCTCTGCTCCTCCATGCAGCCA |
| | GGCCTCAAGTGCAGCTGGTCCAGTCTGGGGCGGAAGTGAAAAAGCCCGGAGCTAGTGTAAAGGTGTCCTG |
| | TAAAGCCAGCGGCTACACCTTCACCGGTTATTACCTGCATTGGGTCCGGCAGGCTCCTGGCCAGGGCCTG |
| | GAGTGGATGGGCTGGATTTCCGCATATAACGGAAACACAAATTACGCCCAGAACCTGCAAGGCCGCGTGA |
| | CCATGACCAGGGACACAAGCACTAGCACTGTCTACATGGAGTTGTCTAGCTTGAGAAGCGAAGATACCGC |
| | TGTGTACTATTGCGCCCGACACTCTTACTCGGGCTCATACTCAACGCTACCCTATTATGGGATGGATGTT |
| | TGGGGTCAAGGGACAACGGTCACAGTATCCTCTGGAGGCGGTGGCAGCGGAGGAGGCGGGTCTGGAGGTG |
| | GTGGATCAGACATTCAGATGACCCAGTCACCAAGTTCCTTATCCGCAAGCGTTGGGGATCGTGTTACAAT |
| | TACTTGCAGGGCCTCGCAAGGGATCTCTAATTATCTCGCTTGGTACCAGCAGAAACCTGGGAAAGCACCC |
| | AAGCTGCTGATCTACACTGCAAGCACACTTTTTCCAGGAGTGCCGTCAAGATTCTCTGGGTCCGGGAGTG |
| | GCACTGACTTCACCCTTACCATCTCCTCCCTCCAGCCTGAGGACTTTGCCACATATTATTGTCAACAGAG |
| | TTACTCCATACCACTCACGTTTGGCGGCGGAACAAAaGTtGAAATCAAGGCGGCAGCAaccacgacgcca |
| | gcgccgcgaccaccaacaccggcgcccaccatcgcgtcgcagccactgtcactgcgcccagaagcgtgcc |
| | ggccagcggcggggggcgcagtgcaTacgagggggctggacttcgcctgtgatatctacatctgggcgcc |
| | cttggccgggacttgtggggtccttctcctgtcactggttatcaccctttactgcaaacggggcagaaag |
| | aaactcctgtatatattcaaacaaccatttatgagaccagtacaaactactcaagaagaggacggctgta |
| | gctgccgatttccagaagaagaagaaggaggatgtgaactgagagtgaagttcagcaggagcgcagacgc |
| | ccccgcgtaccagcagggccagaaccagctctataacgagctcaatctaggacgaagagaggagtacgat |
| | gttttggacaagaggcgtggccgggaccctgagatggggggaaagccgagaaggaagaaccctcaggaag |
| | gcctgtacaatgaactgcagaaagataagatggcggaggcctacagtgagattgggatgaaaggcgagcg |
| | ccggaggggcaaggggcacgatggcctttaccagggtctcagtacagccaccaaggacacctacgacgcc |
| | cttcacatgcaggccctgccccctaggtaaaatcaacctctggattacaaaatttgtgaaagattgactg |
| | gtattcttaactatgttgctccttttacgctatgtggatacgctgctttaatgcctttgtatcatgctat |
| | tgcttcccgtatggctttcattttctcctccttgtataaatcctggttgctgtctctttatgaggagttg |
| | tggcccgttgtcaggcaacgtggcgtggtCtgcactgtgtttgctgacgcaacccccactggttggggca |
| | ttgccaccacctgtcagctcctttccgggactttcgctttccccctccctattgccacggcggaactcat |
| | cgccgcctgccttgcccgctgctggacaggggctcggctgttgggcactgacaattccgtggtgttgtcg |
| | gggaaatcatcgtcctttccttggctgctcgcctgtgttgccacctggattctgcgcgggacgtccttct |
| | gctacgtcccttcggccctcaatccagcggaccttccttcccgcggcctgctgccggctctgcggcctct |
| | tccgcgtcttcgccttcgccctcagacgagtcggatctccctttgggccgcctccccgcctggatccttg |
| | acttgcggccaacttgtttattgcagcttataatggttacaaataaagcaatagcatcacaaatttcaca |
| | aataaagcatttttttcactgcattctagttgtggtttgtccaaactcatcaatgtatcttatcatgtct |
| | gggatccttgacttgcggccgcaactcccacctgcaacatgcgtgactgactgaggccgcgactctagag |
| | tcgaccggatctgcgatcgctccggtgcccgtcagtgggcagagcgcacatcgcccacagtccccgagaa |
| | gttggggggaggggtcggcaattgaacgggtgcctagagaaggtggcgcggggtaaactgggaaagtgat |
| | gtcgtgtactggctccgcctttttcccgagggtgggggagaaccgtatataagtgcagtagtcgccgtga |
| | acgttctttttcgcaacgggtttgccgccagaacacagctgaagcttcgaggggctcgcatctctccttc |
| | acgcgcccgccgccctacctgaggccgccatccacgccggttgagtcgcgttctgccgcctcccgcctgt |
| | ggtgcctcctgaactgcgtccgccgtctaggtaaGTcgactcgttggatccCCACTACCCGGATCAACGC |
| | CCTAGGTTTATGTTTGGATGAACTGACATACGCGTATCCGTCTTAAGAATCTTTTCAAACACTAGTAGTG |
| | AAATATATATTAAACTAGTGTTTGAAAAGATTCTTATTACGGTAACGCGGAATTCGCAACTATTTTATCA |
| | ATTTTTTGCGTCGACACTTCAAGGGGCTTGCGGCCGCAACCATCTCCATGGCTGTTTGAATGAGGCTTCA |
| | GTACTTTACAGAATCGTTGCCTGCACATCTTGGAAACACTTGCTGGGATTACTTCGACTTCTTAACCCAA |
| | CAGAAGGCTCGAGAAGGTATATTGCTGTTGACAGTGAGCGCCAGTGTGAAGCTCTTGTCAGATAGTGAAG |
| | CCACAGATGTATCTGACAAGAGCTTCACACTGATGCCTACTGCCTCGGACTTCAAGGGGCTAGAATTCGA |
| | GCAATTATCTTGTTTACTAAAACTGAATACCTTGCTATCTCTTTGATACATTTTTACAAAGCTGAATTAA |
| | AATGGTATAAATTAAATCACTTTGACGGTGACTTAGGAGTATGCCGGATCAACGCCCTAGGTTTATGTTT |
| | GGATGAACTGACATACGCGTATCCGTCTAAAAATCAATCTCATTTCCTGGTAGTGAAATATATATTAAAC |
| | CAGGAAATGAGATTGATTTTTTTACGGTAACGCGGAATTCGCAACTATTTTATCAATTTTTTGCGTCGAC |
| | GACTGTGACAGCAGAGTATGCCGGATCAACGCCCTAGGTTTATGTTTGGATGAACTGACATACGCGTATC |
| | CGTCTTATGTAAAAGACAAACAATGCGTAGTGAAATATATATTAAACGCATTGTTTGTCTTTTACATATT |
| | ACGGTAACGCGGAATTCGCAACTATTTTATCAATTTTTTGCGTCGACCGGAACTATCTTGAAGAGTAGTA |
| | GTGGactagtgtgacgctgctgacccctttctttcccttctACAGATCCAAGCTGTGACCGGCGCCTACa |
| | cctgcagcccaagcttaccatggccttaccagtgaccgccttgctcctgccgctggccttgctgctccac |
| | gccgccaggcctGATATTCAGATGACACAGAGCCCAAGTTCACTGTCAGCGAGTGTCGGAGATCGGGTTA |
| | CTATAACCTGCCGAGCATCTCAGGATATCAATAATTACCTGGCCTGGTATCAGCAAAAACCCGGCAAAGT |
| | CCCGAAGCTCCTGATATACGCAGCTTCAACACTGCAAAGCGGTGTGCCCTCGCGCTTTAGCGGCTCTGGC |
| | AGCGGGACAGATTTCACCCTGACGATTTCCTCCCTTCAACCCGAGGACGTGGCCACTTACTACTCCCTCA |
| | ACTATTACTCTGTACCCTGGACCTTTGGCCAAGGGACAAAGGTGGAAATCAAGGGCTCTACTAGCGGTTC |
| | AGGGAAACCTGGGAGTGGAGAGGGCTCGACCAAGGGACAGGTCCAGCTCGTGGAGTCTGGCGGTGGGCTG |
| | GTTCAGCCAGGGAGGAGTTTGCGGCTTTCCTGTACGGGAAGCGGATTCACCTTTGGTGACTATGCCATGA |
| | ACTGGGTCAGGCAGGCTCCTGGAAAAGGCCTAGAGTGGGTGGGTTTCATCAGAACCAAGCCATATGGCGG |
| | CACTACAGAATATGCAGCCAGCGTAAAAGGGAGATTCACGTTCAGCCGCGACGACTCTAAGTCAATAGCT |
| | TACCTTCAGATGAACTCCCTCAAGACCGAAGACACCGCCGTGTACTATTGTACTATGATCCCTGTGCTGC |
| | GTTTTTTAGAGTGGTTGCCTTGGGGACAAGGGACATTAGTTACTGTGTCCTCCGCAACCAcgacgccagc |
| | gccgcgaccaccaacaccggcgcccaccatcgcgtcgcagcccctgtccctgcgcccTgaggcgtgcttc |
| | atgtacgtggcggcggccgcctttgtgcttctgttcttcgtgggctgcggggtgctgctgtcccgtaaac |
| | gCagacgtcaacacggtcaactgtggtttccagaaggttttaaggtctccgaagcaagtaagaagaaaag |
| | acgtgaaccactgggagaagatagcgtcggtctgaaaccactcaagaatgccatggtttctaaactgagc |
| | cagctgcagacggagctcctggcggccctgctggagtcagggctgagcaaagaggcactgctccaggcac |
| | tgggCgagccggggccctacctcctggctggagaaggccccctggacaagggggagtcctgcggcggcgg |
| | tcgaggggagctggctgagctgcccaatgggctgggggagactcggggctccgaggacgagacCgacgac |
| | gatggggaagacttcacgccacccatcctcaaagagctggagaacctcagccctgaggaggcggcccacc |
| | agaaagccgtggtggagacccttctgcaggaggacccgtggcgtgtggcgaagatggtcaagtcctacct |
| | gcagcagcacaacatcccacagcgggaggtggtcgataccactggcctcaaccagtcccacctgtcccaa |
| | cacctcaacaagggcactcccatgaagacgcagaagcgggccgccctgtacacctggtaTgtccgcaagc |
| | agcgagaggtggcgcagcagttcacccatgcagggcagggagggctgattgaAgaGcccacaggAgatga |
| | gctaccaaccaagaaggggcggaggaaccgtttcaagtggggcccagcatcccagcagatcctgttccag |
| | gcctatgagaggcagaagaaccctagcaaggaggagcgagaAacgctagtggaggagtgcaatagggcgg |
| | aatgcatccagagaggTgtgtcAccatcacaAgcacaAggTctgggctccaacctcgtcacggaggtgcg |
| | tgtctacaactggtttgccaaccggcgcaaagaagaagccttccggcacaagctggccatgacctgcagg |
| | gatgagtttcccaccatggtgtttccttctgggcagatcagccaggcctcggccttggccccggcccctc |
| | cccaagtcctgccccaggctccagcccctgcccctgctccagccatggtatcagctctggcccaggcccc |
| | agcccctgtcccagtcctagccccaggccctcctcaAgctgtggccccacctgcccccaagcccacccaA |
| | gctggggaaggaacgctgtcagaggccctgctgcagctgcagtttgatgatgaagacctgggggccttgc |
| | ttggcaacagcacagacccagctgtgttcacagacctggcatccgtcgacaactccgagtttcagcagct |
| | gctgaaccagggcatacctgtggccccccacacaactgagcccatgctgatggagtaccctgaggctata |
| | actcgcctagtgacaggggcccagaggccccccgacccagctcctgctccactgggggccccggggctcc |
| | ccaatggcctcctttcaggagatgaagacttctcctccattgcggacatggacttctcagccctgctgag |
| | tcagatcagctccTAAAGGAaataaaagatctttaatgaaaatAGATCTGTGTGTTGGTTTTTTGTGTGa |
| | ataaaagatccagagctctagAGATCTGTGTGTTGGTTTTTTGTGTGCGAGGGCAATCTGGCCCATCAAG |
| | TGGCCTTCGCCTCTGGGAGTAACAAAAATGCACTTCAAAATAGCTTCTGTAATCAAGCTGCATGGGTGGA |
| | GTACTCCCCAGCTGACTCCAGGAAGTTCTCTATCCAAAGCTATTCATTAGGCCAGAGCTGTGCAAATAAT |
| | TAGTCACCCACTTGCTCCATAACCCTCCATGACAGCCCAGGCATTGAGTCCAGGTGGGACCATCAAGCCA |
| | TGCTCTGGTGGCTCATGCATTATCATAGAAATGGGAGGCTTTATTTATTTTACTAAAAAGAACAAAAACA |
| | ACAGACTGCTGTCCTTTAGACAATAGGATCACGTCATCTGAGCCCTCTGTGCCCCAGGTGACAAGCCCAG |
| | CCCCAAGTTCTCTTTCCTCAGCCTCCCCACACATGTTCTGGAGGAGATGGGCCCAGCAGGCTGCTCTGAG |
| | GCCTGGCCCCTCGTAAGCCAAGCATGGCTC |
| LG 239 | GAGCCATGCTTGGCTTACGAGGGCGACCAACCCATCAAACTCCCCGCCCCCAGCACTTTTATTTCTCCTC |
| (with | TTTAGGAAGTACACTTCAGTATCTTTGGCACAGTGCATGAGCACGACTAAAGTAAAACATCGCAGAAAAC |
| sgRNA | ATAGCTTTAGTCTACCCTTCGTGTCCTAAAAGGAAAACCAGTAGCTTCCCAGGCCACCGGAAGGGCAACA |
| and | CATGTCCTCTGCAGTTTCTGCACACGGGAAGGTAAAGACAGAGAGAGGACCTACTCCTCAACACAGAAAC |
| homology | ATTTCAAAATCTTTCCTCGCCTGCAACCCAAGCTGAAGTCATTCTCCCCAGAAATAACAAAAGTTGGAAG |
| wings) | AGAAGCCGGAGACAGGATAGGTGCAGGAAGCCCACACTTTGAGGGCAGCACTCAGACACCCTCTCCTGTG |
| SEQ ID | TGCAGGACGTGCCGAATGTTCAGGTGCAATGAGAATGAGCCATGCTTGGCTTATAaGGTAcgactgtgcc |
| NO: 1121 | ttctagttgccagccatctgttgtttgcccctcccccgtgccttccttgaccctggaaggtgccactccc |
| | actgtcctttcctaataaaatgaggaaattgcatcgcattgtctgagtaggtgtcattctattctggggg |
| | gtggggtggggcaggacagcaagggggaggattgggaagacaatagcaggcatgctggggatgcggtggg |
| | ctctatgggataagcttgatatcgaattcatcgatgttaataattaacatatatgttaatcattaacata |
| | tagttaattattaaccgctatgttaatgattaacaacggttaataattaacatatatgttaatcattaac |
| | atataactagtctagagggtatataatgggggccactagtctactaccagagTtcatcgctagcgctacc |
| | ggatccgccaccATGGCCCTGCCAGTAACGGCTCTGCTGCTGCCACTTGCTCTGCTCCTCCATGCAGCCA |
| | GGCCTCAGGTCCAGTTGGTACAGAGCGGCGCCGAAGTGAAAAAGCCTGGGGCGTCCGTCAAAGTGTCTTG |
| | CAAGGCCTCCGGCTATACATTCACCGGGTACTACATGCATTGGGTGCGGCAGGCACCTGGCCAGGGTCTA |
| | GAATGGATGGGCCGGATCAATCCCAACTCCGGCGGCACAAACTATGCTCAGAAATTTCAAGGTCGCGTCA |
| | CCATGACCCGTGACACAAGTACGAGCACCGTCTACATGGAGCTGTCCTCCCTCAGGAGCGAGGATACAGC |
| | CGTGTACTATTGTGCAAGGGAGCGCGCCGGCTATAGCAGCGGGCAGTTCGATTATTGGGGACAAGGGACT |
| | CTGGTAACTGTGTCCTCCGGAGGCGGAGGATCAGGCGGAGGAGGCTCAGGAGGTGGAGGTTCTGACATTC |
| | AGATGACTCAATCTCCCTCGTCACTGTCAGCTAGTGTTGGGGATAGAGTGACTATTACCTGCCGAGCCAG |
| | TCAGTCAATATCTAACTGGCTCGCATGGTACCAGCAGAAGCCAGGGAAGGCTCCCAAACTGCTGATCTAC |
| | GCCGCGAGCACCCTTCAGAATGGCGTGCCGTCTAGATTTAGCGGTTCTGGGTCTGGGACCGACTTTACAC |
| | TTACTATCAGTAGTTTACAACCAGAGGACTTTGCTACTTATTACTGTCAACAGAGCTACACCTTCCCTAT |
| | TACGTTCGGCCAGGGAACAAAAGTTGAAATCAAGGCGGCAGCAaccacgacgccagcgccgcgaccacca |
| | acaccggcgcccaccatcgcgtcgcagccactgtcactgcgcccagaagcgtgccggccagcggcggggg |
| | gcgcagtgcaTacgagggggctggacttcgcctgtgatatctacatctgggcgcccttggccgggacttg |
| | tggggtccttctcctgtcactggttatcaccctttactgcaaacggggcagaaagaaactcctgtatata |
| | ttcaaacaaccatttatgagaccagtacaaactactcaagaagaggacggctgtagctgccgatttccag |
| | aagaagaagaaggaggatgtgaactgagagtgaagttcagcaggagcgcagacgcccccgcgtaccagca |
| | gggccagaaccagctctataacgagctcaatctaggacgaagagaggagtacgatgttttggacaagagg |
| | cgtggccgggaccctgagatggggggaaagccgagaaggaagaaccctcaggaaggcctgtacaatgaac |
| | tgcagaaagataagatggcggaggcctacagtgagattgggatgaaaggcgagcgccggaggggcaaggg |
| | gcacgatggcctttaccagggtctcagtacagccaccaaggacacctacgacgcccttcacatgcaggcc |
| | ctgccccctaggtaaaatcaacctctggattacaaaatttgtgaaagattgactggtattcttaactatg |
| | ttgctccttttacgctatgtggatacgctgctttaatgcctttgtatcatgctattgcttcccgtatggc |
| | tttcattttctcctccttgtataaatcctggttgctgtctctttatgaggagttgtggcccgttgtcagg |
| | caacgtggcgtggtCtgcactgtgtttgctgacgcaacccccactggttggggcattgccaccacctgtc |
| | agctcctttccgggactttcgctttccccctccctattgccacggcggaactcatcgccgcctgccttgc |
| | ccgctgctggacaggggctcggctgttgggcactgacaattccgtggtgttgtcggggaaatcatcgtcc |
| | tttccttggctgctcgcctgtgttgccacctggattctgcgcgggacgtccttctgctacgtcccttcgg |
| | ccctcaatccagcggaccttccttcccgcggcctgctgccggctctgcggcctcttccgcgtcttcgcct |
| | tcgccctcagacgagtcggatctccctttgggccgcctccccgcctggatccttgacttgcggccaactt |
| | gtttattgcagcttataatggttacaaataaagcaatagcatcacaaatttcacaaataaagcatttttt |
| | tcactgcattctagttgtggtttgtccaaactcatcaatgtatcttatcatgtctgggatccttgacttg |
| | cggccgcaactcccacctgcaacatgcgtgactgactgaggccgcgactctagagtcgaccggatctgcg |
| | atcgctccggtgcccgtcagtgggcagagcgcacatcgcccacagtccccgagaagttggggggaggggt |
| | cggcaattgaacgggtgcctagagaaggtggcgcggggtaaactgggaaagtgatgtcgtgtactggctc |
| | cgcctttttcccgagggtgggggagaaccgtatataagtgcagtagtcgccgtgaacgttctttttcgca |
| | acgggtttgccgccagaacacagctgaagcttcgaggggctcgcatctctccttcacgcgcccgccgccc |
| | tacctgaggccgccatccacgccggttgagtcgcgttctgccgcctcccgcctgtggtgcctcctgaact |
| | gcgtccgccgtctaggtaaGTcgactcgttggatccCCACTACCCGGATCAACGCCCTAGGTTTATGTTT |
| | GGATGAACTGACATACGCGTATCCGTCTTAAGAATCTTTTCAAACACTAGTAGTGAAATATATATTAAAC |
| | TAGTGTTTGAAAAGATTCTTATTACGGTAACGCGGAATTCGCAACTATTTTATCAATTTTTTGCGTCGAC |
| | ACTTCAAGGGGCTTGCGGCCGCAACCATCTCCATGGCTGTTTGAATGAGGCTTCAGTACTTTACAGAATC |
| | GTTGCCTGCACATCTTGGAAACACTTGCTGGGATTACTTCGACTTCTTAACCCAACAGAAGGCTCGAGAA |
| | GGTATATTGCTGTTGACAGTGAGCGCCAGTGTGAAGCTCTTGTCAGATAGTGAAGCCACAGATGTATCTG |
| | ACAAGAGCTTCACACTGATGCCTACTGCCTCGGACTTCAAGGGGCTAGAATTCGAGCAATTATCTTGTTT |
| | ACTAAAACTGAATACCTTGCTATCTCTTTGATACATTTTTACAAAGCTGAATTAAAATGGTATAAATTAA |
| | ATCACTTTGACGGTGACTTAGGAGTATGCCGGATCAACGCCCTAGGTTTATGTTTGGATGAACTGACATA |
| | CGCGTATCCGTCTAAAAATCAATCTCATTTCCTGGTAGTGAAATATATATTAAACCAGGAAATGAGATTG |
| | ATTTTTTTACGGTAACGCGGAATTCGCAACTATTTTATCAATTTTTTGCGTCGACGACTGTGACAGCAGA |
| | GTATGCCGGATCAACGCCCTAGGTTTATGTTTGGATGAACTGACATACGCGTATCCGTCTTATGTAAAAG |
| | ACAAACAATGCGTAGTGAAATATATATTAAACGCATTGTTTGTCTTTTACATATTACGGTAACGCGGAAT |
| | TCGCAACTATTTTATCAATTTTTTGCGTCGACCGGAACTATCTTGAAGAGTAGTAGTGGactagtgtgac |
| | gctgctgacccctttctttcccttctACAGATCCAAGCTGTGACCGGCGCCTACacctgcagcccaagct |
| | taccatggccttaccagtgaccgccttgctcctgccgctggccttgctgctccacgccgccaggcctGAG |
| | ATAGTCCTGACCCAGTCACCCGATTTCCAGAGTGTTACTCCTAAGGAGAAAGTGACTATAACATGCCGGG |
| | CATCTCAGTCTGTCGGAAGCGGGCTACATTGGTACCAGCAGAAGCCTGACCAGAGCCCGAAACTGCTCAT |
| | CAAATATGCCTCCCAGTCGTTTTCTGGCGTGCCCTCTCGCTTTTCCGGAAGCGGATCTGGCACAGACTTC |
| | ACCTTGACCATCAATAGCCTGGAAACTGAGGACGCCGCTACGTATTTCTGCCAGCAGTCCTCCAGTCTGC |
| | CTTGGACATTTGGTCAGGGAACGAAGGTGGAGATCAAGGGTTCAACATCAGGGAGCGGGAAACCGGGCTC |
| | TGGCGAGGGCTCAACAAAGGGACAAGTGCAACTGCAAGAATCGGGACCCGGGCTGGTTAAACCAAGTGAA |
| | ACCCTTTCCCTCACTTGTACCGTAAGCGGCGGTAGCGTGTCCTCTGGTAGCTACTATTGGAGTTGGATTA |
| | GGCAGGCGCCAGGGAAAGGCCTCGAATGGATTGGGTATATCTACTACAGCGGCAGTAACTACTACAACCC |
| | ATCATTGAAGTCTAGAGTGACAATTAGTGTCGATACCTCTAAAAATCAATTCTCACTTAAGCTGCGAGCT |
| | GTAACCGCCGCAGACACTGCGGTGTACTATTGTGCCCGTTGGATGACCACTATCAAGGGCTACTTCGATT |
| | ATTGGGGACAAGGGACATTAGTTACGGTGTCCTCCGCAACCAcgacgccagcgccgcgaccaccaacacc |
| | ggcgcccaccatcgcgtcgcagcccctgtccctgcgcccTgaggcgtgcttcatgtacgtggcggcggcc |
| | gcctttgtgcttctgttcttcgtgggctgcggggtgctgctgtcccgtaaacgCagacgtcaacacggtc |
| | aactgtggtttccagaaggttttaaggtctccgaagcaagtaagaagaaaagacgtgaaccactgggaga |
| | agatagcgtcggtctgaaaccactcaagaatgccatggtttctaaactgagccagctgcagacggagctc |
| | ctggcggccctgctggagtcagggctgagcaaagaggcactgctccaggcactgggCgagccggggccct |
| | acctcctggctggagaaggccccctggacaagggggagtcctgcggcggcggtcgaggggagctggctga |
| | gctgcccaatgggctgggggagactcggggctccgaggacgagacCgacgacgatggggaagacttcacg |
| | ccacccatcctcaaagagctggagaacctcagccctgaggaggcggcccaccagaaagccgtggtggaga |
| | cccttctgcaggaggacccgtggcgtgtggcgaagatggtcaagtcctacctgcagcagcacaacatccc |
| | acagcgggaggtggtcgataccactggcctcaaccagtcccacctgtcccaacacctcaacaagggcact |
| | cccatgaagacgcagaagcgggccgccctgtacacctggtaTgtccgcaagcagcgagaggtggcgcagc |
| | agttcacccatgcagggcagggagggctgattgaAgaGcccacaggAgatgagctaccaaccaagaaggg |
| | gcggaggaaccgtttcaagtggggcccagcatcccagcagatcctgttccaggcctatgagaggcagaag |
| | aaccctagcaaggaggagcgagaAacgctagtggaggagtgcaatagggcggaatgcatccagagaggTg |
| | tgtcAccatcacaAgcacaAggTctgggctccaacctcgtcacggaggtgcgtgtctacaactggtttgc |
| | caaccggcgcaaagaagaagccttccggcacaagctggccatgacctgcagggatgagtttcccaccatg |
| | gtgtttccttctgggcagatcagccaggcctcggccttggccccggcccctccccaagtcctgccccagg |
| | ctccagcccctgcccctgctccagccatggtatcagctctggcccaggccccagcccctgtcccagtcct |
| | agccccaggccctcctcaAgctgtggccccacctgcccccaagcccacccaAgctggggaaggaacgctg |
| | tcagaggccctgctgcagctgcagtttgatgatgaagacctgggggccttgcttggcaacagcacagacc |
| | cagctgtgttcacagacctggcatccgtcgacaactccgagtttcagcagctgctgaaccagggcatacc |
| | tgtggccccccacacaactgagcccatgctgatggagtaccctgaggctataactcgcctagtgacaggg |
| | gcccagaggccccccgacccagctcctgctccactgggggccccggggctccccaatggcctcctttcag |
| | gagatgaagacttctcctccattgcggacatggacttctcagccctgctgagtcagatcagctccTAAAG |
| | GAaataaaagatctttaatgaaaatAGATCTGTGTGTTGGTTTTTTGTGTGaataaaagatccagagctc |
| | tagAGATCTGTGTGTTGGTTTTTTGTGTGCGAGGGCAATCTGGCCCATCAAGTGGCCTTCGCCTCTGGGA |
| | GTAACAAAAATGCACTTCAAAATAGCTTCTGTAATCAAGCTGCATGGGTGGAGTACTCCCCAGCTGACTC |
| | CAGGAAGTTCTCTATCCAAAGCTATTCATTAGGCCAGAGCTGTGCAAATAATTAGTCACCCACTTGCTCC |
| | ATAACCCTCCATGACAGCCCAGGCATTGAGTCCAGGTGGGACCATCAAGCCATGCTCTGGTGGCTCATGC |
| | ATTATCATAGAAATGGGAGGCTTTATTTATTTTACTAAAAAGAACAAAAACAACAGACTGCTGTCCTTTA |
| | GACAATAGGATCACGTCATCTGAGCCCTCTGTGCCCCAGGTGACAAGCCCAGCCCCAAGTTCTCTTTCCT |
| | CAGCCTCCCCACACATGTTCTGGAGGAGATGGGCCCAGCAGGCTGCTCTGAGGCCTGGCCCCTCGTAAGC |
| | CAAGCATGGCTC |
| LG 39 | GAGCCATGCTTGGCTTACGAGGGCGACCAACCCATCAAACTCCCCGCCCCCAGCACTTTTATTTCTCCTC |
| (with | TTTAGGAAGTACACTTCAGTATCTTTGGCACAGTGCATGAGCACGACTAAAGTAAAACATCGCAGAAAAC |
| sgRNA | ATAGCTTTAGTCTACCCTTCGTGTCCTAAAAGGAAAACCAGTAGCTTCCCAGGCCACCGGAAGGGCAACA |
| and | CATGTCCTCTGCAGTTTCTGCACACGGGAAGGTAAAGACAGAGAGAGGACCTACTCCTCAACACAGAAAC |
| homology | ATTTCAAAATCTTTCCTCGCCTGCAACCCAAGCTGAAGTCATTCTCCCCAGAAATAACAAAAGTTGGAAG |
| wings) | AGAAGCCGGAGACAGGATAGGTGCAGGAAGCCCACACTTTGAGGGCAGCACTCAGACACCCTCTCCTGTG |
| SEQ ID | TGCAGGACGTGCCGAATGTTCAGGTGCAATGAGAATGAGCCATGCTTGGCTTATAaGGTAcgactgtgcc |
| NO: 1122 | ttctagttgccagccatctgttgtttgcccctcccccgtgccttccttgaccctggaaggtgccactccc |
| | actgtcctttcctaataaaatgaggaaattgcatcgcattgtctgagtaggtgtcattctattctggggg |
| | gtggggtggggcaggacagcaagggggaggattgggaagacaatagcaggcatgctggggatgcggtggg |
| | ctctatgggataagcttgatatcgaattcatcgatgttaataattaacatatatgttaatcattaacata |
| | tagttaattattaaccgctatgttaatgattaacaacggttaataattaacatatatgttaatcattaac |
| | atataactagtctagagggtatataatgggggccactagtctactaccagagTtcatcgctagcgctacc |
| | ggatccgccaccATGGCCCTGCCAGTAACGGCTCTGCTGCTGCCACTTGCTCTGCTCCTCCATGCAGCCA |
| | GGCCTCAGGTCCAGTTGGTACAGAGCGGCGCCGAAGTGAAAAAGCCTGGGGCGTCCGTCAAAGTGTCTTG |
| | CAAGGCCTCCGGCTATACATTCACCGGGTACTACATGCATTGGGTGCGGCAGGCACCTGGCCAGGGTCTA |
| | GAATGGATGGGCCGGATCAATCCCAACTCCGGCGGCACAAACTATGCTCAGAAATTTCAAGGTCGCGTCA |
| | CCATGACCCGTGACACAAGTACGAGCACCGTCTACATGGAGCTGTCCTCCCTCAGGAGCGAGGATACAGC |
| | CGTGTACTATTGTGCAAGGGAGCGCGCCGGCTATAGCAGCGGGCAGTTCGATTATTGGGGACAAGGGACT |
| | CTGGTAACTGTGTCCTCCGGAGGCGGAGGATCAGGCGGAGGAGGCTCAGGAGGTGGAGGTTCTGACATTC |
| | AGATGACTCAATCTCCCTCGTCACTGTCAGCTAGTGTTGGGGATAGAGTGACTATTACCTGCCGAGCCAG |
| | TCAGTCAATATCTAACTGGCTCGCATGGTACCAGCAGAAGCCAGGGAAGGCTCCCAAACTGCTGATCTAC |
| | GCCGCGAGCACCCTTCAGAATGGCGTGCCGTCTAGATTTAGCGGTTCTGGGTCTGGGACCGACTTTACAC |
| | TTACTATCAGTAGTTTACAACCAGAGGACTTTGCTACTTATTACTGTCAACAGAGCTACACCTTCCCTAT |
| | TACGTTCGGCCAGGGAACAAAAGTTGAAATCAAGGCGGCAGCAaccacgacgccagcgccgcgaccacca |
| | acaccggcgcccaccatcgcgtcgcagccactgtcactgcgcccagaagcgtgccggccagcggcggggg |
| | gcgcagtgcaTacgagggggctggacttcgcctgtgatatctacatctgggcgcccttggccgggacttg |
| | tggggtccttctcctgtcactggttatcaccctttactgcaaacggggcagaaagaaactcctgtatata |
| | ttcaaacaaccatttatgagaccagtacaaactactcaagaagaggacggctgtagctgccgatttccag |
| | aagaagaagaaggaggatgtgaactgagagtgaagttcagcaggagcgcagacgcccccgcgtaccagca |
| | gggccagaaccagctctataacgagctcaatctaggacgaagagaggagtacgatgttttggacaagagg |
| | cgtggccgggaccctgagatggggggaaagccgagaaggaagaaccctcaggaaggcctgtacaatgaac |
| | tgcagaaagataagatggcggaggcctacagtgagattgggatgaaaggcgagcgccggaggggcaaggg |
| | gcacgatggcctttaccagggtctcagtacagccaccaaggacacctacgacgcccttcacatgcaggcc |
| | ctgccccctaggtaaaatcaacctctggattacaaaatttgtgaaagattgactggtattcttaactatg |
| | ttgctccttttacgctatgtggatacgctgctttaatgcctttgtatcatgctattgcttcccgtatggc |
| | tttcattttctcctccttgtataaatcctggttgctgtctctttatgaggagttgtggcccgttgtcagg |
| | caacgtggcgtggtCtgcactgtgtttgctgacgcaacccccactggttggggcattgccaccacctgtc |
| | agctcctttccgggactttcgctttccccctccctattgccacggcggaactcatcgccgcctgccttgc |
| | ccgctgctggacaggggctcggctgttgggcactgacaattccgtggtgttgtcggggaaatcatcgtcc |
| | tttccttggctgctcgcctgtgttgccacctggattctgcgcgggacgtccttctgctacgtcccttcgg |
| | ccctcaatccagcggaccttccttcccgcggcctgctgccggctctgcggcctcttccgcgtcttcgcct |
| | tcgccctcagacgagtcggatctccctttgggccgcctccccgcctggatccttgacttgcggccaactt |
| | gtttattgcagcttataatggttacaaataaagcaatagcatcacaaatttcacaaataaagcatttttt |
| | tcactgcattctagttgtggtttgtccaaactcatcaatgtatcttatcatgtctgggatccttgacttg |
| | cggccgcaactcccacctgcaacatgcgtgactgactgaggccgcgactctagagtcgaccggatctgcg |
| | atcgctccggtgcccgtcagtgggcagagcgcacatcgcccacagtccccgagaagttggggggaggggt |
| | cggcaattgaacgggtgcctagagaaggtggcgcggggtaaactgggaaagtgatgtcgtgtactggctc |
| | cgcctttttcccgagggtgggggagaaccgtatataagtgcagtagtcgccgtgaacgttctttttcgca |
| | acgggtttgccgccagaacacagctgaagcttcgaggggctcgcatctctccttcacgcgcccgccgccc |
| | tacctgaggccgccatccacgccggttgagtcgcgttctgccgcctcccgcctgtggtgcctcctgaact |
| | gcgtccgccgtctaggtaaGTcgactcgttggatccCCACTACCCGGATCAACGCCCTAGGTTTATGTTT |
| | GGATGAACTGACATACGCGTATCCGTCTTAAGAATCTTTTCAAACACTAGTAGTGAAATATATATTAAAC |
| | TAGTGTTTGAAAAGATTCTTATTACGGTAACGCGGAATTCGCAACTATTTTATCAATTTTTTGCGTCGAC |
| | ACTTCAAGGGGCTTGCGGCCGCAACCATCTCCATGGCTGTTTGAATGAGGCTTCAGTACTTTACAGAATC |
| | GTTGCCTGCACATCTTGGAAACACTTGCTGGGATTACTTCGACTTCTTAACCCAACAGAAGGCTCGAGAA |
| | GGTATATTGCTGTTGACAGTGAGCGCCAGTGTGAAGCTCTTGTCAGATAGTGAAGCCACAGATGTATCTG |
| | ACAAGAGCTTCACACTGATGCCTACTGCCTCGGACTTCAAGGGGCTAGAATTCGAGCAATTATCTTGTTT |
| | ACTAAAACTGAATACCTTGCTATCTCTTTGATACATTTTTACAAAGCTGAATTAAAATGGTATAAATTAA |
| | ATCACTTTGACGGTGACTTAGGAGTATGCCGGATCAACGCCCTAGGTTTATGTTTGGATGAACTGACATA |
| | CGCGTATCCGTCTAAAAATCAATCTCATTTCCTGGTAGTGAAATATATATTAAACCAGGAAATGAGATTG |
| | ATTTTTTTACGGTAACGCGGAATTCGCAACTATTTTATCAATTTTTTGCGTCGACGACTGTGACAGCAGA |
| | GTATGCCGGATCAACGCCCTAGGTTTATGTTTGGATGAACTGACATACGCGTATCCGTCTTATGTAAAAG |
| | ACAAACAATGCGTAGTGAAATATATATTAAACGCATTGTTTGTCTTTTACATATTACGGTAACGCGGAAT |
| | TCGCAACTATTTTATCAATTTTTTGCGTCGACCGGAACTATCTTGAAGAGTAGTAGTGGactagtgtgac |
| | gctgctgacccctttctttcccttctACAGATCCAAGCTGTGACCGGCGCCTACacctgcagcccaagct |
| | taccatggccttaccagtgaccgccttgctcctgccgctggccttgctgctccacgccgccaggcctGAA |
| | ATCGTCCTGACACAGTCTCCAGATTTTCAGAGCGTGACGCCAAAGGAGAAAGTGACAATTACATGCCGGG |
| | CATCTCAGTCTGTTGGGTCTGGGTTGCATTGGTATCAGCAAAAGCCCGACCAGTCACCCAAACTGCTCAT |
| | CAAATATGCAAGCCAGAGTTTTTCAGGCGTACCTTCACGATTTAGCGGAAGTGGTTCTGGCACTGACTTC |
| | ACCTTGACGATTAATAGCCTGGAAGTAGAAGACGCTGCCACTTTCTACTGCCTGCAAAGTAGCTCCCTGC |
| | CCTGGACTTTTGGGCAGGGTACTAAGGTCGAGATCAAGGGCTCGACAAGCGGAAGTGGCAAACCGGGCAG |
| | CGGCGAGGGAAGCACCAAGGGACAAGTGCAACTGCAAGAGTCTGGACCCGGGCTGGTGAAACCAAGCGAG |
| | ACATTATCCCTCACTTGTACCGTGTCAGGCGGTAGTGTGTCCTCCGGGAATTTCTACTGGAGTTGGATAC |
| | GCCAGCCTCCTGGGAAGGGCCTTGAATGGATTGGCTACATCTACTATTCAGGCTCCACCTACTACAACCC |
| | GTCTTTGAAGTCAAGGGTTACGATAAGCGTCGATACCTCCAAAAACCAATTCTCCCTAAAGCTCAGATCG |
| | TTAACTGCCGCTGATACCGCGGTGTACTATTGTGCCCGTTGGATGACCAAAGTTAAGGGTTATTTCGACT |
| | ATTGGGGACAAGGGACACTTGTCACCGTGTCCTCCGCAACCAcgacgccagcgccgcgaccaccaacacc |
| | ggcgcccaccatcgcgtcgcagcccctgtccctgcgcccTgaggcgtgcttcatgtacgtggcggcggcc |
| | gcctttgtgcttctgttcttcgtgggctgcggggtgctgctgtcccgtaaacgCagacgtcaacacggtc |
| | aactgtggtttccagaaggttttaaggtctccgaagcaagtaagaagaaaagacgtgaaccactgggaga |
| | agatagcgtcggtctgaaaccactcaagaatgccatggtttctaaactgagccagctgcagacggagctc |
| | ctggcggccctgctggagtcagggctgagcaaagaggcactgctccaggcactgggCgagccggggccct |
| | acctcctggctggagaaggccccctggacaagggggagtcctgcggcggcggtcgaggggagctggctga |
| | gctgcccaatgggctgggggagactcggggctccgaggacgagacCgacgacgatggggaagacttcacg |
| | ccacccatcctcaaagagctggagaacctcagccctgaggaggcggcccaccagaaagccgtggtggaga |
| | cccttctgcaggaggacccgtggcgtgtggcgaagatggtcaagtcctacctgcagcagcacaacatccc |
| | acagcgggaggtggtcgataccactggcctcaaccagtcccacctgtcccaacacctcaacaagggcact |
| | cccatgaagacgcagaagcgggccgccctgtacacctggtaTgtccgcaagcagcgagaggtggcgcagc |
| | agttcacccatgcagggcagggagggctgattgaAgaGcccacaggAgatgagctaccaaccaagaaggg |
| | gcggaggaaccgtttcaagtggggcccagcatcccagcagatcctgttccaggcctatgagaggcagaag |
| | aaccctagcaaggaggagcgagaAacgctagtggaggagtgcaatagggcggaatgcatccagagaggTg |
| | tgtcAccatcacaAgcacaAggTctgggctccaacctcgtcacggaggtgcgtgtctacaactggtttgc |
| | caaccggcgcaaagaagaagccttccggcacaagctggccatgacctgcagggatgagtttcccaccatg |
| | gtgtttccttctgggcagatcagccaggcctcggccttggccccggcccctccccaagtcctgccccagg |
| | ctccagcccctgcccctgctccagccatggtatcagctctggcccaggccccagcccctgtcccagtcct |
| | agccccaggccctcctcaAgctgtggccccacctgcccccaagcccacccaAgctggggaaggaacgctg |
| | tcagaggccctgctgcagctgcagtttgatgatgaagacctgggggccttgcttggcaacagcacagacc |
| | cagctgtgttcacagacctggcatccgtcgacaactccgagtttcagcagctgctgaaccagggcatacc |
| | tgtggccccccacacaactgagcccatgctgatggagtaccctgaggctataactcgcctagtgacaggg |
| | gcccagaggccccccgacccagctcctgctccactgggggccccggggctccccaatggcctcctttcag |
| | gagatgaagacttctcctccattgcggacatggacttctcagccctgctgagtcagatcagctccTAAAG |
| | GACGGGTGGCATCCCTGTGACCCCTCCCCAGTGCCTCTCCTGGCCCTGGAAGTTGCCACTCCAGTGCCCA |
| | CCAGCCTTGTCCTAATAAAATTAAGTTGCATCATTTTGTCTGACTAGGTGTCCTTCTATAATATTATGGG |
| | GTGGAGGGGGGTGGTATGGAGCAAGGGGCAAGTTGGGAAGACAACCTGTAGGGCCTGCGGGGTCTATTGG |
| | GAACCAAGCTGGAGTGCAGTGGCACAATCTTGGCTCACTGCAATCTCCGCCTCCTGGGTTCAAGCGATTC |
| | TCCTGCCTCAGCCTCCCGAGTTGTTGGGATTCCAGGCATGCATGACCAGGCTCAGCTAATTTTTGTTTTT |
| | TTGGTAGAaACGGGGTTTCACCATATTGGCCAGGCTGGTCTCCAACTCCTAATCTCAGGTGATCTACCCA |
| | CCTTGGCCTCCCAAATTGCTGGGATTACAGGCGTGAACCACTGCTCCCttccctgtccttcCGAGGGCAA |
| | TCTGGCCCATCAAGTGGCCTTCGCCTCTGGGAGTAACAAAAATGCACTTCAAAATAGCTTCTGTAATCAA |
| | GCTGCATGGGTGGAGTACTCCCCAGCTGACTCCAGGAAGTTCTCTATCCAAAGCTATTCATTAGGCCAGA |
| | GCTGTGCAAATAATTAGTCACCCACTTGCTCCATAACCCTCCATGACAGCCCAGGCATTGAGTCCAGGTG |
| | GGACCATCAAGCCATGCTCTGGTGGCTCATGCATTATCATAGAAATGGGAGGCTTTATTTATTTTACTAA |
| | AAAGAACAAAAACAACAGACTGCTGTCCTTTAGACAATAGGATCACGTCATCTGAGCCCTCTGTGCCCCA |
| | GGTGACAAGCCCAGCCCCAAGTTCTCTTTCCTCAGCCTCCCCACACATGTTCTGGAGGAGATGGGCCCAG |
| | CAGGCTGCTCTGAGGCCTGGCCCCTCGTAAGCCAAGCATGGCTC |
| LG 43 | GAGCCATGCTTGGCTTACGAGGGCGACCAACCCATCAAACTCCCCGCCCCCAGCACTTTTATTTCTCCTC |
| (with | TTTAGGAAGTACACTTCAGTATCTTTGGCACAGTGCATGAGCACGACTAAAGTAAAACATCGCAGAAAAC |
| sgRNA | ATAGCTTTAGTCTACCCTTCGTGTCCTAAAAGGAAAACCAGTAGCTTCCCAGGCCACCGGAAGGGCAACA |
| and | CATGTCCTCTGCAGTTTCTGCACACGGGAAGGTAAAGACAGAGAGAGGACCTACTCCTCAACACAGAAAC |
| homology | ATTTCAAAATCTTTCCTCGCCTGCAACCCAAGCTGAAGTCATTCTCCCCAGAAATAACAAAAGTTGGAAG |
| wings) | AGAAGCCGGAGACAGGATAGGTGCAGGAAGCCCACACTTTGAGGGCAGCACTCAGACACCCTCTCCTGTG |
| SEQ ID | TGCAGGACGTGCCGAATGTTCAGGTGCAATGAGAATGAGCCATGCttggcttataaggtacgactgtgcc |
| NO: 1123 | ttctagttgccagccatctgttgtttgcccctcccccgtgccttccttgaccctggaaggtgccactccc |
| | actgtcctttcctaataaaatgaggaaattgcatcgcattgtctgagtaggtgtcattctattctggggg |
| | gtggggtggggcaggacagcaagggggaggattgggaagacaatagcaggcatgctggggatgcggtggg |
| | ctctatgggataagcttgatatcgaattcatcgatgttaataattaacatatatgttaatcattaacata |
| | tagttaattattaaccgctatgttaatgattaacaacggttaataattaacatatatgttaatcattaac |
| | atataactagtctagagggtatataatgggggccactagtctactaccagagTtcatcgctagcgctacc |
| | ggatccgccaccATGGCCCTGCCAGTAACGGCTCTGCTGCTGCCACTTGCTCTGCTCCTCCATGCAGCCA |
| | GGCCTCAAGTGCAGCTGGTCCAGTCTGGGGCGGAAGTGAAAAAGCCCGGAGCTAGTGTAAAGGTGTCCTG |
| | TAAAGCCAGCGGCTACACCTTCACCGGTTATTACCTGCATTGGGTCCGGCAGGCTCCTGGCCAGGGCCTG |
| | GAGTGGATGGGCTGGATTTCCGCATATAACGGAAACACAAATTACGCCCAGAACCTGCAAGGCCGCGTGA |
| | CCATGACCAGGGACACAAGCACTAGCACTGTCTACATGGAGTTGTCTAGCTTGAGAAGCGAAGATACCGC |
| | TGTGTACTATTGCGCCCGACACTCTTACTCGGGCTCATACTCAACGCTACCCTATTATGGGATGGATGTT |
| | TGGGGTCAAGGGACAACGGTCACAGTATCCTCTGGAGGCGGTGGCAGCGGAGGAGGCGGGTCTGGAGGTG |
| | GTGGATCAGACATTCAGATGACCCAGTCACCAAGTTCCTTATCCGCAAGCGTTGGGGATCGTGTTACAAT |
| | TACTTGCAGGGCCTCGCAAGGGATCTCTAATTATCTCGCTTGGTACCAGCAGAAACCTGGGAAAGCACCC |
| | AAGCTGCTGATCTACACTGCAAGCACACTTTTTCCAGGAGTGCCGTCAAGATTCTCTGGGTCCGGGAGTG |
| | GCACTGACTTCACCCTTACCATCTCCTCCCTCCAGCCTGAGGACTTTGCCACATATTATTGTCAACAGAG |
| | TTACTCCATACCACTCACGTTTGGCGGCGGAACAAAaGTtGAAATCAAGGCGGCAGCAaccacgacgcca |
| | gcgccgcgaccaccaacaccggcgcccaccatcgcgtcgcagccactgtcactgcgcccagaagcgtgcc |
| | ggccagcggcggggggcgcagtgcaTacgagggggctggacttcgcctgtgatatctacatctgggcgcc |
| | cttggccgggacttgtggggtccttctcctgtcactggttatcaccctttactgcaaacggggcagaaag |
| | aaactcctgtatatattcaaacaaccatttatgagaccagtacaaactactcaagaagaggacggctgta |
| | gctgccgatttccagaagaagaagaaggaggatgtgaactgagagtgaagttcagcaggagcgcagacgc |
| | ccccgcgtaccagcagggccagaaccagctctataacgagctcaatctaggacgaagagaggagtacgat |
| | gttttggacaagaggcgtggccgggaccctgagatggggggaaagccgagaaggaagaaccctcaggaag |
| | gcctgtacaatgaactgcagaaagataagatggcggaggcctacagtgagattgggatgaaaggcgagcg |
| | ccggaggggcaaggggcacgatggcctttaccagggtctcagtacagccaccaaggacacctacgacgcc |
| | cttcacatgcaggccctgccccctaggtaaaatcaacctctggattacaaaatttgtgaaagattgactg |
| | gtattcttaactatgttgctccttttacgctatgtggatacgctgctttaatgcctttgtatcatgctat |
| | tgcttcccgtatggctttcattttctcctccttgtataaatcctggttgctgtctctttatgaggagttg |
| | tggcccgttgtcaggcaacgtggcgtggtCtgcactgtgtttgctgacgcaacccccactggttggggca |
| | ttgccaccacctgtcagctcctttccgggactttcgctttccccctccctattgccacggcggaactcat |
| | cgccgcctgccttgcccgctgctggacaggggctcggctgttgggcactgacaattccgtggtgttgtcg |
| | gggaaatcatcgtcctttccttggctgctcgcctgtgttgccacctggattctgcgcgggacgtccttct |
| | gctacgtcccttcggccctcaatccagcggaccttccttcccgcggcctgctgccggctctgcggcctct |
| | tccgcgtcttcgccttcgccctcagacgagtcggatctccctttgggccgcctccccgcctggatccttg |
| | acttgcggccaacttgtttattgcagcttataatggttacaaataaagcaatagcatcacaaatttcaca |
| | aataaagcatttttttcactgcattctagttgtggtttgtccaaactcatcaatgtatcttatcatgtct |
| | gggatccttgacttgcggccgcaactcccacctgcaacatgcgtgactgactgaggccgcgactctagag |
| | tcgaccggatctgcgatcgctccggtgcccgtcagtgggcagagcgcacatcgcccacagtccccgagaa |
| | gttggggggaggggtcggcaattgaacgggtgcctagagaaggtggcgcggggtaaactgggaaagtgat |
| | gtcgtgtactggctccgcctttttcccgagggtgggggagaaccgtatataagtgcagtagtcgccgtga |
| | acgttctttttcgcaacgggtttgccgccagaacacagctgaagcttcgaggggctcgcatctctccttc |
| | acgcgcccgccgccctacctgaggccgccatccacgccggttgagtcgcgttctgccgcctcccgcctgt |
| | ggtgcctcctgaactgcgtccgccgtctaggtaaGTcgactcgttggatccCCACTACCCGGATCAACGC |
| | CCTAGGTTTATGTTTGGATGAACTGACATACGCGTATCCGTCTTAAGAATCTTTTCAAACACTAGTAGTG |
| | AAATATATATTAAACTAGTGTTTGAAAAGATTCTTATTACGGTAACGCGGAATTCGCAACTATTTTATCA |
| | ATTTTTTGCGTCGACACTTCAAGGGGCTTGCGGCCGCAACCATCTCCATGGCTGTTTGAATGAGGCTTCA |
| | GTACTTTACAGAATCGTTGCCTGCACATCTTGGAAACACTTGCTGGGATTACTTCGACTTCTTAACCCAA |
| | CAGAAGGCTCGAGAAGGTATATTGCTGTTGACAGTGAGCGCCAGTGTGAAGCTCTTGTCAGATAGTGAAG |
| | CCACAGATGTATCTGACAAGAGCTTCACACTGATGCCTACTGCCTCGGACTTCAAGGGGCTAGAATTCGA |
| | GCAATTATCTTGTTTACTAAAACTGAATACCTTGCTATCTCTTTGATACATTTTTACAAAGCTGAATTAA |
| | AATGGTATAAATTAAATCACTTTGACGGTGACTTAGGAGTATGCCGGATCAACGCCCTAGGTTTATGTTT |
| | GGATGAACTGACATACGCGTATCCGTCTAAAAATCAATCTCATTTCCTGGTAGTGAAATATATATTAAAC |
| | CAGGAAATGAGATTGATTTTTTTACGGTAACGCGGAATTCGCAACTATTTTATCAATTTTTTGCGTCGAC |
| | GACTGTGACAGCAGAGTATGCCGGATCAACGCCCTAGGTTTATGTTTGGATGAACTGACATACGCGTATC |
| | CGTCTTATGTAAAAGACAAACAATGCGTAGTGAAATATATATTAAACGCATTGTTTGTCTTTTACATATT |
| | ACGGTAACGCGGAATTCGCAACTATTTTATCAATTTTTTGCGTCGACCGGAACTATCTTGAAGAGTAGTA |
| | GTGGactagtgtgacgctgctgacccctttctttcccttctACAGATCCAAGCTGTGACCGGCGCCTACa |
| | cctgcagcccaagcttaccatggccttaccagtgaccgccttgctcctgccgctggccttgctgctccac |
| | gccgccaggcctGAGATAGTCCTGACCCAGTCACCCGATTTCCAGAGTGTTACTCCTAAGGAGAAAGTGA |
| | CTATAACATGCCGGGCATCTCAGTCTGTCGGAAGCGGGCTACATTGGTACCAGCAGAAGCCTGACCAGAG |
| | CCCGAAACTGCTCATCAAATATGCCTCCCAGTCGTTTTCTGGCGTGCCCTCTCGCTTTTCCGGAAGCGGA |
| | TCTGGCACAGACTTCACCTTGACCATCAATAGCCTGGAAACTGAGGACGCCGCTACGTATTTCTGCCAGC |
| | AGTCCTCCAGTCTGCCTTGGACATTTGGTCAGGGAACGAAGGTGGAGATCAAGGGTTCAACATCAGGGAG |
| | CGGGAAACCGGGCTCTGGCGAGGGCTCAACAAAGGGACAAGTGCAACTGCAAGAATCGGGACCCGGGCTG |
| | GTTAAACCAAGTGAAACCCTTTCCCTCACTTGTACCGTAAGCGGCGGTAGCGTGTCCTCTGGTAGCTACT |
| | ATTGGAGTTGGATTAGGCAGGCGCCAGGGAAAGGCCTCGAATGGATTGGGTATATCTACTACAGCGGCAG |
| | TAACTACTACAACCCATCATTGAAGTCTAGAGTGACAATTAGTGTCGATACCTCTAAAAATCAATTCTCA |
| | CTTAAGCTGCGAGCTGTAACCGCCGCAGACACTGCGGTGTACTATTGTGCCCGTTGGATGACCACTATCA |
| | AGGGCTACTTCGATTATTGGGGACAAGGGACATTAGTTACGGTGTCCTCCGCAACCAcgacgccagcgcc |
| | gcgaccaccaacaccggcgcccaccatcgcgtcgcagcccctgtccctgcgcccTgaggcgtgcttcatg |
| | tacgtggcggcggccgcctttgtgcttctgttcttcgtgggctgcggggtgctgctgtcccgtaaacgCa |
| | gacgtcaacacggtcaactgtggtttccagaaggttttaaggtctccgaagcaagtaagaagaaaagacg |
| | tgaaccactgggagaagatagcgtcggtctgaaaccactcaagaatgccatggtttctaaactgagccag |
| | ctgcagacggagctcctggcggccctgctggagtcagggctgagcaaagaggcactgctccaggcactgg |
| | gCgagccggggccctacctcctggctggagaaggccccctggacaagggggagtcctgcggcggcggtcg |
| | aggggagctggctgagctgcccaatgggctgggggagactcggggctccgaggacgagacCgacgacgat |
| | ggggaagacttcacgccacccatcctcaaagagctggagaacctcagccctgaggaggcggcccaccaga |
| | aagccgtggtggagacccttctgcaggaggacccgtggcgtgtggcgaagatggtcaagtcctacctgca |
| | gcagcacaacatcccacagcgggaggtggtcgataccactggcctcaaccagtcccacctgtcccaacac |
| | ctcaacaagggcactcccatgaagacgcagaagcgggccgccctgtacacctggtaTgtccgcaagcagc |
| | gagaggtggcgcagcagttcacccatgcagggcagggagggctgattgaAgaGcccacaggAgatgagct |
| | accaaccaagaaggggcggaggaaccgtttcaagtggggcccagcatcccagcagatcctgttccaggcc |
| | tatgagaggcagaagaaccctagcaaggaggagcgagaAacgctagtggaggagtgcaatagggcggaat |
| | gcatccagagaggTgtgtcAccatcacaAgcacaAggTctgggctccaacctcgtcacggaggtgcgtgt |
| | ctacaactggtttgccaaccggcgcaaagaagaagccttccggcacaagctggccatgacctgcagggat |
| | gagtttcccaccatggtgtttccttctgggcagatcagccaggcctcggccttggccccggcccctcccc |
| | aagtcctgccccaggctccagcccctgcccctgctccagccatggtatcagctctggcccaggccccagc |
| | ccctgtcccagtcctagccccaggccctcctcaAgctgtggccccacctgcccccaagcccacccaAgct |
| | ggggaaggaacgctgtcagaggccctgctgcagctgcagtttgatgatgaagacctgggggccttgcttg |
| | gcaacagcacagacccagctgtgttcacagacctggcatccgtcgacaactccgagtttcagcagctgct |
| | gaaccagggcatacctgtggccccccacacaactgagcccatgctgatggagtaccctgaggctataact |
| | cgcctagtgacaggggcccagaggccccccgacccagctcctgctccactgggggccccggggctcccca |
| | atggcctcctttcaggagatgaagacttctcctccattgcggacatggacttctcagccctgctgagtca |
| | gatcagctccTAAAGGACGGGTGGCATCCCTGTGACCCCTCCCCAGTGCCTCTCCTGGCCCTGGAAGTTG |
| | CCACTCCAGTGCCCACCAGCCTTGTCCTAATAAAATTAAGTTGCATCATTTTGTCTGACTAGGTGTCCTT |
| | CTATAATATTATGGGGTGGAGGGGGGTGGTATGGAGCAAGGGGCAAGTTGGGAAGACAACCTGTAGGGCC |
| | TGCGGGGTCTATTGGGAACCAAGCTGGAGTGCAGTGGCACAATCTTGGCTCACTGCAATCTCCGCCTCCT |
| | GGGTTCAAGCGATTCTCCTGCCTCAGCCTCCCGAGTTGTTGGGATTCCAGGCATGCATGACCAGGCTCAG |
| | CTAATTTTTGTTTTTTTGGTAGAaACGGGGTTTCACCATATTGGCCAGGCTGGTCTCCAACTCCTAATCT |
| | CAGGTGATCTACCCACCTTGGCCTCCCAAATTGCTGGGATTACAGGCGTGAACCACTGCTCCCttccctg |
| | tccttcCGAGGGCAATCTGGCCCATCAAGTGGCCTTCGCCTCTGGGAGTAACAAAAATGCACTTCAAAAT |
| | AGCTTCTGTAATCAAGCTGCATGGGTGGAGTACTCCCCAGCTGACTCCAGGAAGTTCTCTATCCAAAGCT |
| | ATTCATTAGGCCAGAGCTGTGCAAATAATTAGTCACCCACTTGCTCCATAACCCTCCATGACAGCCCAGG |
| | CATTGAGTCCAGGTGGGACCATCAAGCCATGCTCTGGTGGCTCATGCATTATCATAGAAATGGGAGGCTT |
| | TATTTATTTTACTAAAAAGAACAAAAACAACAGACTGCTGTCCTTTAGACAATAGGATCACGTCATCTGA |
| | GCCCTCTGTGCCCCAGGTGACAAGCCCAGCCCCAAGTTCTCTTTCCTCAGCCTCCCCACACATGTTCTGG |
| | AGGAGATGGGCCCAGCAGGCTGCTCTGAGGCCTGGCCCCTCGTAAGCCAAGCATGGCTC |
| LG 47 | GAGCCATGCTTGGCTTACGAGGGCGACCAACCCATCAAACTCCCCGCCCCCAGCACTTTTATTTCTCCTC |
| (with | TTTAGGAAGTACACTTCAGTATCTTTGGCACAGTGCATGAGCACGACTAAAGTAAAACATCGCAGAAAAC |
| sgRNA | ATAGCTTTAGTCTACCCTTCGTGTCCTAAAAGGAAAACCAGTAGCTTCCCAGGCCACCGGAAGGGCAACA |
| homology | CATGTCCTCTGCAGTTTCTGCACACGGGAAGGTAAAGACAGAGAGAGGACCTACTCCTCAACACAGAAAC |
| wings) | AGAAGCCGGAGACAGGATAGGTGCAGGAAGCCCACACTTTGAGGGCAGCACTCAGACACCCTCTCCTGTG |
| and | ATTTCAAAATCTTTCCTCGCCTGCAACCCAAGCTGAAGTCATTCTCCCCAGAAATAACAAAAGTTGGAAG |
| NO: 1124 | ttctagttgccagccatctgttgtttgcccctcccccgtgccttccttgaccctggaaggtgccactccc |
| SEQ ID | TGCAGGACGTGCCGAATGTTCAGGTGCAATGAGAATGAGCCATGCttggcttataaggtacgactgtgcc |
| | actgtcctttcctaataaaatgaggaaattgcatcgcattgtctgagtaggtgtcattctattctggggg |
| | gtggggtggggcaggacagcaagggggaggattgggaagacaatagcaggcatgctggggatgcggtggg |
| | ctctatgggataagcttgatatcgaattcatcgatgttaataattaacatatatgttaatcattaacata |
| | tagttaattattaaccgctatgttaatgattaacaacggttaataattaacatatatgttaatcattaac |
| | atataactagtctagagggtatataatgggggccactagtctactaccagagTtcatcgctagcgctacc |
| | ggatccgccaccATGGCCCTGCCAGTAACGGCTCTGCTGCTGCCACTTGCTCTGCTCCTCCATGCAGCCA |
| | GGCCTCAGGTCCAGTTGGTACAGAGCGGCGCCGAAGTGAAAAAGCCTGGGGCGTCCGTCAAAGTGTCTTG |
| | CAAGGCCTCCGGCTATACATTCACCGGGTACTACATGCATTGGGTGCGGCAGGCACCTGGCCAGGGTCTA |
| | GAATGGATGGGCCGGATCAATCCCAACTCCGGCGGCACAAACTATGCTCAGAAATTTCAAGGTCGCGTCA |
| | CCATGACCCGTGACACAAGTACGAGCACCGTCTACATGGAGCTGTCCTCCCTCAGGAGCGAGGATACAGC |
| | CGTGTACTATTGTGCAAGGGAGCGCGCCGGCTATAGCAGCGGGCAGTTCGATTATTGGGGACAAGGGACT |
| | CTGGTAACTGTGTCCTCCGGAGGCGGAGGATCAGGCGGAGGAGGCTCAGGAGGTGGAGGTTCTGACATTC |
| | AGATGACTCAATCTCCCTCGTCACTGTCAGCTAGTGTTGGGGATAGAGTGACTATTACCTGCCGAGCCAG |
| | TCAGTCAATATCTAACTGGCTCGCATGGTACCAGCAGAAGCCAGGGAAGGCTCCCAAACTGCTGATCTAC |
| | GCCGCGAGCACCCTTCAGAATGGCGTGCCGTCTAGATTTAGCGGTTCTGGGTCTGGGACCGACTTTACAC |
| | TTACTATCAGTAGTTTACAACCAGAGGACTTTGCTACTTATTACTGTCAACAGAGCTACACCTTCCCTAT |
| | TACGTTCGGCCAGGGAACAAAAGTTGAAATCAAGGCGGCAGCAaccacgacgccagcgccgcgaccacca |
| | acaccggcgcccaccatcgcgtcgcagccactgtcactgcgcccagaagcgtgccggccagcggcggggg |
| | gcgcagtgcaTacgagggggctggacttcgcctgtgatatctacatctgggcgcccttggccgggacttg |
| | tggggtccttctcctgtcactggttatcaccctttactgcaaacggggcagaaagaaactcctgtatata |
| | ttcaaacaaccatttatgagaccagtacaaactactcaagaagaggacggctgtagctgccgatttccag |
| | aagaagaagaaggaggatgtgaactgagagtgaagttcagcaggagcgcagacgcccccgcgtaccagca |
| | gggccagaaccagctctataacgagctcaatctaggacgaagagaggagtacgatgttttggacaagagg |
| | cgtggccgggaccctgagatggggggaaagccgagaaggaagaaccctcaggaaggcctgtacaatgaac |
| | tgcagaaagataagatggcggaggcctacagtgagattgggatgaaaggcgagcgccggaggggcaaggg |
| | gcacgatggcctttaccagggtctcagtacagccaccaaggacacctacgacgcccttcacatgcaggcc |
| | ctgccccctaggtaaaatcaacctctggattacaaaatttgtgaaagattgactggtattcttaactatg |
| | ttgctccttttacgctatgtggatacgctgctttaatgcctttgtatcatgctattgcttcccgtatggc |
| | tttcattttctcctccttgtataaatcctggttgctgtctctttatgaggagttgtggcccgttgtcagg |
| | caacgtggcgtggtCtgcactgtgtttgctgacgcaacccccactggttggggcattgccaccacctgtc |
| | agctcctttccgggactttcgctttccccctccctattgccacggcggaactcatcgccgcctgccttgc |
| | ccgctgctggacaggggctcggctgttgggcactgacaattccgtggtgttgtcggggaaatcatcgtcc |
| | tttccttggctgctcgcctgtgttgccacctggattctgcgcgggacgtccttctgctacgtcccttcgg |
| | ccctcaatccagcggaccttccttcccgcggcctgctgccggctctgcggcctcttccgcgtcttcgcct |
| | tcgccctcagacgagtcggatctccctttgggccgcctccccgcctggatccttgacttgcggccaactt |
| | gtttattgcagcttataatggttacaaataaagcaatagcatcacaaatttcacaaataaagcatttttt |
| | tcactgcattctagttgtggtttgtccaaactcatcaatgtatcttatcatgtctgggatccttgacttg |
| | cggccgcaactcccacctgcaacatgcgtgactgactgaggccgcgactctagagtcgaccggatctgcg |
| | atcgctccggtgcccgtcagtgggcagagcgcacatcgcccacagtccccgagaagttggggggaggggt |
| | cggcaattgaacgggtgcctagagaaggtggcgcggggtaaactgggaaagtgatgtcgtgtactggctc |
| | cgcctttttcccgagggtgggggagaaccgtatataagtgcagtagtcgccgtgaacgttctttttcgca |
| | acgggtttgccgccagaacacagctgaagcttcgaggggctcgcatctctccttcacgcgcccgccgccc |
| | tacctgaggccgccatccacgccggttgagtcgcgttctgccgcctcccgcctgtggtgcctcctgaact |
| | gcgtccgccgtctaggtaaGTcgactcgttggatccCCACTACCCGGATCAACGCCCTAGGTTTATGTTT |
| | GGATGAACTGACATACGCGTATCCGTCTTAAGAATCTTTTCAAACACTAGTAGTGAAATATATATTAAAC |
| | TAGTGTTTGAAAAGATTCTTATTACGGTAACGCGGAATTCGCAACTATTTTATCAATTTTTTGCGTCGAC |
| | ACTTCAAGGGGCTTGCGGCCGCAACCATCTCCATGGCTGTTTGAATGAGGCTTCAGTACTTTACAGAATC |
| | GTTGCCTGCACATCTTGGAAACACTTGCTGGGATTACTTCGACTTCTTAACCCAACAGAAGGCTCGAGAA |
| | GGTATATTGCTGTTGACAGTGAGCGCCAGTGTGAAGCTCTTGTCAGATAGTGAAGCCACAGATGTATCTG |
| | ACAAGAGCTTCACACTGATGCCTACTGCCTCGGACTTCAAGGGGCTAGAATTCGAGCAATTATCTTGTTT |
| | ACTAAAACTGAATACCTTGCTATCTCTTTGATACATTTTTACAAAGCTGAATTAAAATGGTATAAATTAA |
| | ATCACTTTGACGGTGACTTAGGAGTATGCCGGATCAACGCCCTAGGTTTATGTTTGGATGAACTGACATA |
| | CGCGTATCCGTCTAAAAATCAATCTCATTTCCTGGTAGTGAAATATATATTAAACCAGGAAATGAGATTG |
| | ATTTTTTTACGGTAACGCGGAATTCGCAACTATTTTATCAATTTTTTGCGTCGACGACTGTGACAGCAGA |
| | GTATGCCGGATCAACGCCCTAGGTTTATGTTTGGATGAACTGACATACGCGTATCCGTCTTATGTAAAAG |
| | ACAAACAATGCGTAGTGAAATATATATTAAACGCATTGTTTGTCTTTTACATATTACGGTAACGCGGAAT |
| | TCGCAACTATTTTATCAATTTTTTGCGTCGACCGGAACTATCTTGAAGAGTAGTAGTGGactagtgtgac |
| | gctgctgacccctttctttcccttctACAGATCCAAGCTGTGACCGGCGCCTACacctgcagcccaagct |
| | taccatggccttaccagtgaccgccttgctcctgccgctggccttgctgctccacgccgccaggcctGAG |
| | ATAGTCCTGACCCAGTCACCCGATTTCCAGAGTGTTACTCCTAAGGAGAAAGTGACTATAACATGCCGGG |
| | CATCTCAGTCTGTCGGAAGCGGGCTACATTGGTACCAGCAGAAGCCTGACCAGAGCCCGAAACTGCTCAT |
| | CAAATATGCCTCCCAGTCGTTTTCTGGCGTGCCCTCTCGCTTTTCCGGAAGCGGATCTGGCACAGACTTC |
| | ACCTTGACCATCAATAGCCTGGAAACTGAGGACGCCGCTACGTATTTCTGCCAGCAGTCCTCCAGTCTGC |
| | CTTGGACATTTGGTCAGGGAACGAAGGTGGAGATCAAGGGTTCAACATCAGGGAGCGGGAAACCGGGCTC |
| | TGGCGAGGGCTCAACAAAGGGACAAGTGCAACTGCAAGAATCGGGACCCGGGCTGGTTAAACCAAGTGAA |
| | ACCCTTTCCCTCACTTGTACCGTAAGCGGCGGTAGCGTGTCCTCTGGTAGCTACTATTGGAGTTGGATTA |
| | GGCAGGCGCCAGGGAAAGGCCTCGAATGGATTGGGTATATCTACTACAGCGGCAGTAACTACTACAACCC |
| | ATCATTGAAGTCTAGAGTGACAATTAGTGTCGATACCTCTAAAAATCAATTCTCACTTAAGCTGCGAGCT |
| | GTAACCGCCGCAGACACTGCGGTGTACTATTGTGCCCGTTGGATGACCACTATCAAGGGCTACTTCGATT |
| | ATTGGGGACAAGGGACATTAGTTACGGTGTCCTCCGCAACCAcgacgccagcgccgcgaccaccaacacc |
| | ggcgcccaccatcgcgtcgcagcccctgtccctgcgcccTgaggcgtgcttcatgtacgtggcggcggcc |
| | gcctttgtgcttctgttcttcgtgggctgcggggtgctgctgtcccgtaaacgCagacgtcaacacggtc |
| | aactgtggtttccagaaggttttaaggtctccgaagcaagtaagaagaaaagacgtgaaccactgggaga |
| | agatagcgtcggtctgaaaccactcaagaatgccatggtttctaaactgagccagctgcagacggagctc |
| | ctggcggccctgctggagtcagggctgagcaaagaggcactgctccaggcactgggCgagccggggccct |
| | acctcctggctggagaaggccccctggacaagggggagtcctgcggcggcggtcgaggggagctggctga |
| | gctgcccaatgggctgggggagactcggggctccgaggacgagacCgacgacgatggggaagacttcacg |
| | ccacccatcctcaaagagctggagaacctcagccctgaggaggcggcccaccagaaagccgtggtggaga |
| | cccttctgcaggaggacccgtggcgtgtggcgaagatggtcaagtcctacctgcagcagcacaacatccc |
| | acagcgggaggtggtcgataccactggcctcaaccagtcccacctgtcccaacacctcaacaagggcact |
| | cccatgaagacgcagaagcgggccgccctgtacacctggtaTgtccgcaagcagcgagaggtggcgcagc |
| | agttcacccatgcagggcagggagggctgattgaAgaGcccacaggAgatgagctaccaaccaagaaggg |
| | gcggaggaaccgtttcaagtggggcccagcatcccagcagatcctgttccaggcctatgagaggcagaag |
| | aaccctagcaaggaggagcgagaAacgctagtggaggagtgcaatagggcggaatgcatccagagaggTg |
| | tgtcAccatcacaAgcacaAggTctgggctccaacctcgtcacggaggtgcgtgtctacaactggtttgc |
| | caaccggcgcaaagaagaagccttccggcacaagctggccatgacctgcagggatgagtttcccaccatg |
| | gtgtttccttctgggcagatcagccaggcctcggccttggccccggcccctccccaagtcctgccccagg |
| | ctccagcccctgcccctgctccagccatggtatcagctctggcccaggccccagcccctgtcccagtcct |
| | agccccaggccctcctcaAgctgtggccccacctgcccccaagcccacccaAgctggggaaggaacgctg |
| | tcagaggccctgctgcagctgcagtttgatgatgaagacctgggggccttgcttggcaacagcacagacc |
| | cagctgtgttcacagacctggcatccgtcgacaactccgagtttcagcagctgctgaaccagggcatacc |
| | tgtggccccccacacaactgagcccatgctgatggagtaccctgaggctataactcgcctagtgacaggg |
| | gcccagaggccccccgacccagctcctgctccactgggggccccggggctccccaatggcctcctttcag |
| | gagatgaagacttctcctccattgcggacatggacttctcagccctgctgagtcagatcagctccTAAAG |
| | GACGGGTGGCATCCCTGTGACCCCTCCCCAGTGCCTCTCCTGGCCCTGGAAGTTGCCACTCCAGTGCCCA |
| | CCAGCCTTGTCCTAATAAAATTAAGTTGCATCATTTTGTCTGACTAGGTGTCCTTCTATAATATTATGGG |
| | GTGGAGGGGGGTGGTATGGAGCAAGGGGCAAGTTGGGAAGACAACCTGTAGGGCCTGCGGGGTCTATTGG |
| | GAACCAAGCTGGAGTGCAGTGGCACAATCTTGGCTCACTGCAATCTCCGCCTCCTGGGTTCAAGCGATTC |
| | TCCTGCCTCAGCCTCCCGAGTTGTTGGGATTCCAGGCATGCATGACCAGGCTCAGCTAATTTTTGTTTTT |
| | TTGGTAGAaACGGGGTTTCACCATATTGGCCAGGCTGGTCTCCAACTCCTAATCTCAGGTGATCTACCCA |
| | CCTTGGCCTCCCAAATTGCTGGGATTACAGGCGTGAACCACTGCTCCCttccctqtccttcCGAGGGCAA |
| | TCTGGCCCATCAAGTGGCCTTCGCCTCTGGGAGTAACAAAAATGCACTTCAAAATAGCTTCTGTAATCAA |
| | GCTGCATGGGTGGAGTACTCCCCAGCTGACTCCAGGAAGTTCTCTATCCAAAGCTATTCATTAGGCCAGA |
| | GCTGTGCAAATAATTAGTCACCCACTTGCTCCATAACCCTCCATGACAGCCCAGGCATTGAGTCCAGGTG |
| | GGACCATCAAGCCATGCTCTGGTGGCTCATGCATTATCATAGAAATGGGAGGCTTTATTTATTTTACTAA |
| | AAAGAACAAAAACAACAGACTGCTGTCCTTTAGACAATAGGATCACGTCATCTGAGCCCTCTGTGCCCCA |
| | GGTGACAAGCCCAGCCCCAAGTTCTCTTTCCTCAGCCTCCCCACACATGTTCTGGAGGAGATGGGCCCAG |
| | CAGGCTGCTCTGAGGCCTGGCCCCTCGTAAGCCAAGCATGGCTC |
| 5′ | CGACCAACCCATCAAACTCCCCGCCCCCAGCACTTTTATTTCTCCTCTTTAGGAAGTACACTTCAGTATC |
| homology | TTTGGCACAGTGCATGAGCACGACTAAAGTAAAACATCGCAGAAAACATAGCTTTAGTCTACCCTTCGTG |
| wing | TCCTAAAAGGAAAACCAGTAGCTTCCCAGGCCACCGGAAGGGCAACACATGTCCTCTGCAGTTTCTGCAC |
| SEQ ID | ACGGGAAGGTAAAGACAGAGAGAGGACCTACTCCTCAACACAGAAACATTTCAAAATCTTTCCTCGCCTG |
| NO: 1235 | CAACCCAAGCTGAAGTCATTCTCCCCAGAAATAACAAAAGTTGGAAGAGAAGCCGGAGACAGGATAGGTG |
| | CAGGAAGCCCACACTTTGAGGGCAGCACTCAGACACCCTCTCCTGTGTGCAGGACGTGCCGAATGTTCAG |
| | GTGCAATGAGAATGAGCCATGCTTGGCTTA |
| 5′ | CGAGGGCAATCTGGCCCATCAAGTGGCCTTCGCCTCTGGGAGTAACAAAAATGCACTTCAAAATAGCTTC |
| homology | TGTAATCAAGCTGCATGGGTGGAGTACTCCCCAGCTGACTCCAGGAAGTTCTCTATCCAAAGCTATTCAT |
| wing | TAGGCCAGAGCTGTGCAAATAATTAGTCACCCACTTGCTCCATAACCCTCCATGACAGCCCAGGCATTGA |
| SEQ ID | GTCCAGGTGGGACCATCAAGCCATGCTCTGGTGGCTCATGCATTATCATAGAAATGGGAGGCTTTATTTA |
| NO: 1236 | TTTTACTAAAAAGAACAAAAACAACAGACTGCTGTCCTTTAGACAATAGGATCACGTCATCTGAGCCCTC |
| | TGTGCCCCAGGTGACAAGCCCAGCCCCAAGTTCTCTTTCCTCAGCCTCCCCACACATGTTCTGGAGGAGA |
| | TGGGCCCAGCAGGCTGCTCTGAGGCCTGGC |
| sgRNA 94 | GAGCCATGCTTGGCTTACGA |
| sequence | |
| SEQ ID | |
| NO: 932 | |
| sgRNA 94 | TCGTAAGCCAAGCATGGCTC |
| reverse | |
| complement | |
| sequence | |
| SEQ ID | |
| NO: 1237 | |
| LG 219 | cgactgtgccttctagttgccagccatctgttgtttgcccctcccccgtgccttccttgaccctggaagg |
| core | tgccactcccactgtcctttcctaataaaatgaggaaattgcatcgcattgtctgagtaggtgtcattct |
| insert | attctggggggtggggtggggcaggacagcaagggggaggattgggaagacaatagcaggcatgctgggg |
| (w/o | atgcggtgggctctatgggataagcttgatatcgaattcatcgatgttaataattaacatatatgttaat |
| homology | cattaacatatagttaattattaaccgctatgttaatgattaacaacggttaataattaacatatatgtt |
| wings) | aatcattaacatataactagtctagagggtatataatgggggccactagtctactaccagagTtcatcgc |
| SEQ ID | tagcgctaccggatccgccaccATGGCCCTGCCAGTAACGGCTCTGCTGCTGCCACTTGCTCTGCTCCTC |
| NO: 1238 | CATGCAGCCAGGCCTCAAGTGCAGCTGGTCCAGTCTGGGGCGGAAGTGAAAAAGCCCGGAGCTAGTGTAA |
| | AGGTGTCCTGTAAAGCCAGCGGCTACACCTTCACCGGTTATTACCTGCATTGGGTCCGGCAGGCTCCTGG |
| | CCAGGGCCTGGAGTGGATGGGCTGGATTTCCGCATATAACGGAAACACAAATTACGCCCAGAACCTGCAA |
| | GGCCGCGTGACCATGACCAGGGACACAAGCACTAGCACTGTCTACATGGAGTTGTCTAGCTTGAGAAGCG |
| | AAGATACCGCTGTGTACTATTGCGCCCGACACTCTTACTCGGGCTCATACTCAACGCTACCCTATTATGG |
| | GATGGATGTTTGGGGTCAAGGGACAACGGTCACAGTATCCTCTGGAGGCGGTGGCAGCGGAGGAGGCGGG |
| | TCTGGAGGTGGTGGATCAGACATTCAGATGACCCAGTCACCAAGTTCCTTATCCGCAAGCGTTGGGGATC |
| | GTGTTACAATTACTTGCAGGGCCTCGCAAGGGATCTCTAATTATCTCGCTTGGTACCAGCAGAAACCTGG |
| | GAAAGCACCCAAGCTGCTGATCTACACTGCAAGCACACTTTTTCCAGGAGTGCCGTCAAGATTCTCTGGG |
| | TCCGGGAGTGGCACTGACTTCACCCTTACCATCTCCTCCCTCCAGCCTGAGGACTTTGCCACATATTATT |
| | GTCAACAGAGTTACTCCATACCACTCACGTTTGGCGGCGGAACAAAaGTtGAAATCAAGGCGGCAGCAac |
| | cacgacgccagcgccgcgaccaccaacaccggcgcccaccatcgcgtcgcagccactgtcactgcgccca |
| | gaagcgtgccggccagcggcggggggcgcagtgcaTacgagggggctggacttcgcctgtgatatctaca |
| | tctgggcgcccttggccgggacttgtggggtccttctcctgtcactggttatcaccctttactgcaaacg |
| | gggcagaaagaaactcctgtatatattcaaacaaccatttatgagaccagtacaaactactcaagaagag |
| | gacggctgtagctgccgatttccagaagaagaagaaggaggatgtgaactgagagtgaagttcagcagga |
| | gcgcagacgcccccgcgtaccagcagggccagaaccagctctataacgagctcaatctaggacgaagaga |
| | ggagtacgatgttttggacaagaggcgtggccgggaccctgagatggggggaaagccgagaaggaagaac |
| | cctcaggaaggcctgtacaatgaactgcagaaagataagatggcggaggcctacagtgagattgggatga |
| | aaggcgagcgccggaggggcaaggggcacgatggcctttaccagggtctcagtacagccaccaaggacac |
| | ctacgacgcccttcacatgcaggccctgccccctaggtaaaatcaacctctggattacaaaatttgtgaa |
| | agattgactggtattcttaactatgttgctccttttacgctatgtggatacgctgctttaatgcctttgt |
| | atcatgctattgcttcccgtatggctttcattttctcctccttgtataaatcctggttgctgtctcttta |
| | tgaggagttgtggcccgttgtcaggcaacgtggcgtggtCtgcactgtgtttgctgacgcaacccccact |
| | ggttggggcattgccaccacctgtcagctcctttccgggactttcgctttccccctccctattgccacgg |
| | cggaactcatcgccgcctgccttgcccgctgctggacaggggctcggctgttgggcactgacaattccgt |
| | ggtgttgtcggggaaatcatcgtcctttccttggctgctcgcctgtgttgccacctggattctgcgcggg |
| | acgtccttctgctacgtcccttcggccctcaatccagcggaccttccttcccgcggcctgctgccggctc |
| | tgcggcctcttccgcgtcttcgccttcgccctcagacgagtcggatctccctttgggccgcctccccgcc |
| | tggatccttgacttgcggccaacttgtttattgcagcttataatggttacaaataaagcaatagcatcac |
| | aaatttcacaaataaagcatttttttcactgcattctagttgtggtttgtccaaactcatcaatgtatct |
| | tatcatgtctgggatccttgacttgcggccgcaactcccacctgcaacatgcgtgactgactgaggccgc |
| | gactctagagtcgaccggatctgcgatcgctccggtgcccgtcagtgggcagagcgcacatcgcccacag |
| | tccccgagaagttggggggaggggtcggcaattgaacgggtgcctagagaaggtggcgcggggtaaactg |
| | ggaaagtgatgtcgtgtactggctccgcctttttcccgagggtgggggagaaccgtatataagtgcagta |
| | gtcgccgtgaacgttctttttcgcaacgggtttgccgccagaacacagctgaagcttcgaggggctcgca |
| | tctctccttcacgcgcccgccgccctacctgaggccgccatccacgccggttgagtcgcgttctgccgcc |
| | tcccgcctgtggtgcctcctgaactgcgtccgccgtctaggtaaGTcgactcgttggatccCCACTACCC |
| | GGATCAACGCCCTAGGTTTATGTTTGGATGAACTGACATACGCGTATCCGTCTTAAGAATCTTTTCAAAC |
| | ACTAGTAGTGAAATATATATTAAACTAGTGTTTGAAAAGATTCTTATTACGGTAACGCGGAATTCGCAAC |
| | TATTTTATCAATTTTTTGCGTCGACACTTCAAGGGGCTTGCGGCCGCAACCATCTCCATGGCTGTTTGAA |
| | TGAGGCTTCAGTACTTTACAGAATCGTTGCCTGCACATCTTGGAAACACTTGCTGGGATTACTTCGACTT |
| | CTTAACCCAACAGAAGGCTCGAGAAGGTATATTGCTGTTGACAGTGAGCGCCAGTGTGAAGCTCTTGTCA |
| | GATAGTGAAGCCACAGATGTATCTGACAAGAGCTTCACACTGATGCCTACTGCCTCGGACTTCAAGGGGC |
| | TAGAATTCGAGCAATTATCTTGTTTACTAAAACTGAATACCTTGCTATCTCTTTGATACATTTTTACAAA |
| | GCTGAATTAAAATGGTATAAATTAAATCACTTTGACGGTGACTTAGGAGTATGCCGGATCAACGCCCTAG |
| | GTTTATGTTTGGATGAACTGACATACGCGTATCCGTCTAAAAATCAATCTCATTTCCTGGTAGTGAAATA |
| | TATATTAAACCAGGAAATGAGATTGATTTTTTTACGGTAACGCGGAATTCGCAACTATTTTATCAATTTT |
| | TTGCGTCGACGACTGTGACAGCAGAGTATGCCGGATCAACGCCCTAGGTTTATGTTTGGATGAACTGACA |
| | TACGCGTATCCGTCTTATGTAAAAGACAAACAATGCGTAGTGAAATATATATTAAACGCATTGTTTGTCT |
| | TTTACATATTACGGTAACGCGGAATTCGCAACTATTTTATCAATTTTTTGCGTCGACCGGAACTATCTTG |
| | AAGAGTAGTAGTGGactagtgtgacgctgctgacccctttctttcccttctACAGATCCAAGCTGTGACC |
| | GGCGCCTACacctgcagcccaagcttaccatggccttaccagtgaccgccttgctcctgccgctggcctt |
| | gctgctccacgccgccaggcctGATATTCAGATGACACAGAGCCCAAGTTCACTGTCAGCGAGTGTCGGA |
| | GATCGGGTTACTATAACCTGCCGAGCATCTCAGGATATCAATAATTACCTGGCCTGGTATCAGCAAAAAC |
| | CCGGCAAAGTCCCGAAGCTCCTGATATACGCAGCTTCAACACTGCAAAGCGGTGTGCCCTCGCGCTTTAG |
| | CGGCTCTGGCAGCGGGACAGATTTCACCCTGACGATTTCCTCCCTTCAACCCGAGGACGTGGCCACTTAC |
| | TACTCCCTCAACTATTACTCTGTACCCTGGACCTTTGGCCAAGGGACAAAGGTGGAAATCAAGGGCTCTA |
| | CTAGCGGTTCAGGGAAACCTGGGAGTGGAGAGGGCTCGACCAAGGGACAGGTCCAGCTCGTGGAGTCTGG |
| | CGGTGGGCTGGTTCAGCCAGGGAGGAGTTTGCGGCTTTCCTGTACGGGAAGCGGATTCACCTTTGGTGAC |
| | TATGCCATGAACTGGGTCAGGCAGGCTCCTGGAAAAGGCCTAGAGTGGGTGGGTTTCATCAGAACCAAGC |
| | CATATGGCGGCACTACAGAATATGCAGCCAGCGTAAAAGGGAGATTCACGTTCAGCCGCGACGACTCTAA |
| | GTCAATAGCTTACCTTCAGATGAACTCCCTCAAGACCGAAGACACCGCCGTGTACTATTGTACTATGATC |
| | CCTGTGCTGCGTTTTTTAGAGTGGTTGCCTTGGGGACAAGGGACATTAGTTACTGTGTCCTCCGCAACCA |
| | cgacgccagcgccgcgaccaccaacaccggcgcccaccatcgcgtcgcagcccctgtccctgcgcccTga |
| | ggcgtgcttcatgtacgtggcggcggccgcctttgtgcttctgttcttcgtgggctgcggggtgctgctg |
| | tcccgtaaacgCagacgtcaacacggtcaactgtggtttccagaaggttttaaggtctccgaagcaagta |
| | agaagaaaagacgtgaaccactgggagaagatagcgtcggtctgaaaccactcaagaatgccatggtttc |
| | taaactgagccagctgcagacggagctcctggcggccctgctggagtcagggctgagcaaagaggcactg |
| | ctccaggcactgggCgagccggggccctacctcctggctggagaaggccccctggacaagggggagtcct |
| | gcggcggcggtcgaggggagctggctgagctgcccaatgggctgggggagactcggggctccgaggacga |
| | gacCgacgacgatggggaagacttcacgccacccatcctcaaagagctggagaacctcagccctgaggag |
| | gcggcccaccagaaagccgtggtggagacccttctgcaggaggacccgtggcgtgtggcgaagatggtca |
| | agtcctacctgcagcagcacaacatcccacagcgggaggtggtcgataccactggcctcaaccagtccca |
| | cctgtcccaacacctcaacaagggcactcccatgaagacgcagaagcgggccgccctgtacacctggtaT |
| | gtccgcaagcagcgagaggtggcgcagcagttcacccatgcagggcagggagggctgattgaAgaGccca |
| | caggAgatgagctaccaaccaagaaggggcggaggaaccgtttcaagtggggcccagcatcccagcagat |
| | cctgttccaggcctatgagaggcagaagaaccctagcaaggaggagcgagaAacgctagtggaggagtgc |
| | aatagggcggaatgcatccagagaggTgtgtcAccatcacaAgcacaAggTctgggctccaacctcgtca |
| | cggaggtgcgtgtctacaactggtttgccaaccggcgcaaagaagaagccttccggcacaagctggccat |
| | gacctgcagggatgagtttcccaccatggtgtttccttctgggcagatcagccaggcctcggccttggcc |
| | ccggcccctccccaagtcctgccccaggctccagcccctgcccctgctccagccatggtatcagctctgg |
| | cccaggccccagcccctgtcccagtcctagccccaggccctcctcaAgctgtggccccacctgcccccaa |
| | gcccacccaAgctggggaaggaacgctgtcagaggccctgctgcagctgcagtttgatgatgaagacctg |
| | ggggccttgcttggcaacagcacagacccagctgtgttcacagacctggcatccgtcgacaactccgagt |
| | ttcagcagctgctgaaccagggcatacctgtggccccccacacaactgagcccatgctgatggagtaccc |
| | tgaggctataactcgcctagtgacaggggcccagaggccccccgacccagctcctgctccactgggggcc |
| | ccggggctccccaatggcctcctttcaggagatgaagacttctcctccattgcggacatggacttctcag |
| | ccctgctgagtcagatcagctcc |
| LG 239 | cgactgtgccttctagttgccagccatctgttgtttgcccctcccccgtgccttccttgaccctggaagg |
| core | tgccactcccactgtcctttcctaataaaatgaggaaattgcatcgcattgtctgagtaggtgtcattct |
| insert | attctggggggtggggtggggcaggacagcaagggggaggattgggaagacaatagcaggcatgctgggg |
| (w/o | atgcggtgggctctatgggataagcttgatatcgaattcatcgatgttaataattaacatatatgttaat |
| homology | cattaacatatagttaattattaaccgctatgttaatgattaacaacggttaataattaacatatatgtt |
| wings) | aatcattaacatataactagtctagagggtatataatgggggccactagtctactaccagagTtcatcgc |
| SEQ ID | tagcgctaccggatccgccaccATGGCCCTGCCAGTAACGGCTCTGCTGCTGCCACTTGCTCTGCTCCTC |
| NO: 1239 | CATGCAGCCAGGCCTCAGGTCCAGTTGGTACAGAGCGGCGCCGAAGTGAAAAAGCCTGGGGCGTCCGTCA |
| | AAGTGTCTTGCAAGGCCTCCGGCTATACATTCACCGGGTACTACATGCATTGGGTGCGGCAGGCACCTGG |
| | CCAGGGTCTAGAATGGATGGGCCGGATCAATCCCAACTCCGGCGGCACAAACTATGCTCAGAAATTTCAA |
| | GGTCGCGTCACCATGACCCGTGACACAAGTACGAGCACCGTCTACATGGAGCTGTCCTCCCTCAGGAGCG |
| | AGGATACAGCCGTGTACTATTGTGCAAGGGAGCGCGCCGGCTATAGCAGCGGGCAGTTCGATTATTGGGG |
| | ACAAGGGACTCTGGTAACTGTGTCCTCCGGAGGCGGAGGATCAGGCGGAGGAGGCTCAGGAGGTGGAGGT |
| | TCTGACATTCAGATGACTCAATCTCCCTCGTCACTGTCAGCTAGTGTTGGGGATAGAGTGACTATTACCT |
| | GCCGAGCCAGTCAGTCAATATCTAACTGGCTCGCATGGTACCAGCAGAAGCCAGGGAAGGCTCCCAAACT |
| | GCTGATCTACGCCGCGAGCACCCTTCAGAATGGCGTGCCGTCTAGATTTAGCGGTTCTGGGTCTGGGACC |
| | GACTTTACACTTACTATCAGTAGTTTACAACCAGAGGACTTTGCTACTTATTACTGTCAACAGAGCTACA |
| | CCTTCCCTATTACGTTCGGCCAGGGAACAAAAGTTGAAATCAAGGCGGCAGCAaccacgacgccagcgcc |
| | gcgaccaccaacaccggcgcccaccatcgcgtcgcagccactgtcactgcgcccagaagcgtgccggcca |
| | gcggcggggggcgcagtgcaTacgagggggctggacttcgcctgtgatatctacatctgggcgcccttgg |
| | ccgggacttgtggggtccttctcctgtcactggttatcaccctttactgcaaacggggcagaaagaaact |
| | cctgtatatattcaaacaaccatttatgagaccagtacaaactactcaagaagaggacggctgtagctgc |
| | cgatttccagaagaagaagaaggaggatgtgaactgagagtgaagttcagcaggagcgcagacgcccccg |
| | cgtaccagcagggccagaaccagctctataacgagctcaatctaggacgaagagaggagtacgatgtttt |
| | ggacaagaggcgtggccgggaccctgagatggggggaaagccgagaaggaagaaccctcaggaaggcctg |
| | tacaatgaactgcagaaagataagatggcggaggcctacagtgagattgggatgaaaggcgagcgccgga |
| | ggggcaaggggcacgatggcctttaccagggtctcagtacagccaccaaggacacctacgacgcccttca |
| | catgcaggccctgccccctaggtaaaatcaacctctggattacaaaatttgtgaaagattgactggtatt |
| | cttaactatgttgctccttttacgctatgtggatacgctgctttaatgcctttgtatcatgctattgctt |
| | cccgtatggctttcattttctcctccttgtataaatcctggttgctgtctctttatgaggagttgtggcc |
| | cgttgtcaggcaacgtggcgtggtCtgcactgtgtttgctgacgcaacccccactggttggggcattgcc |
| | accacctgtcagctcctttccgggactttcgctttccccctccctattgccacggcggaactcatcgccg |
| | cctgccttgcccgctgctggacaggggctcggctgttgggcactgacaattccgtggtgttgtcggggaa |
| | atcatcgtcctttccttggctgctcgcctgtgttgccacctggattctgcgcgggacgtccttctgctac |
| | gtcccttcggccctcaatccagcggaccttccttcccgcggcctgctgccggctctgcggcctcttccgc |
| | gtcttcgccttcgccctcagacgagtcggatctccctttgggccgcctccccgcctggatccttgacttg |
| | cggccaacttgtttattgcagcttataatggttacaaataaagcaatagcatcacaaatttcacaaataa |
| | agcatttttttcactgcattctagttgtggtttgtccaaactcatcaatgtatcttatcatgtctgggat |
| | ccttgacttgcggccgcaactcccacctgcaacatgcgtgactgactgaggccgcgactctagagtcgac |
| | cggatctgcgatcgctccggtgcccgtcagtgggcagagcgcacatcgcccacagtccccgagaagttgg |
| | ggggaggggtcggcaattgaacgggtgcctagagaaggtggcgcggggtaaactgggaaagtgatgtcgt |
| | gtactggctccgcctttttcccgagggtgggggagaaccgtatataagtgcagtagtcgccgtgaacgtt |
| | ctttttcgcaacgggtttgccgccagaacacagctgaagcttcgaggggctcgcatctctccttcacgcg |
| | cccgccgccctacctgaggccgccatccacgccggttgagtcgcgttctgccgcctcccgcctgtggtgc |
| | ctcctgaactgcgtccgccgtctaggtaaGTcgactcgttggatccCCACTACCCGGATCAACGCCCTAG |
| | GTTTATGTTTGGATGAACTGACATACGCGTATCCGTCTTAAGAATCTTTTCAAACACTAGTAGTGAAATA |
| | TATATTAAACTAGTGTTTGAAAAGATTCTTATTACGGTAACGCGGAATTCGCAACTATTTTATCAATTTT |
| | TTGCGTCGACACTTCAAGGGGCTTGCGGCCGCAACCATCTCCATGGCTGTTTGAATGAGGCTTCAGTACT |
| | TTACAGAATCGTTGCCTGCACATCTTGGAAACACTTGCTGGGATTACTTCGACTTCTTAACCCAACAGAA |
| | GGCTCGAGAAGGTATATTGCTGTTGACAGTGAGCGCCAGTGTGAAGCTCTTGTCAGATAGTGAAGCCACA |
| | GATGTATCTGACAAGAGCTTCACACTGATGCCTACTGCCTCGGACTTCAAGGGGCTAGAATTCGAGCAAT |
| | TATCTTGTTTACTAAAACTGAATACCTTGCTATCTCTTTGATACATTTTTACAAAGCTGAATTAAAATGG |
| | TATAAATTAAATCACTTTGACGGTGACTTAGGAGTATGCCGGATCAACGCCCTAGGTTTATGTTTGGATG |
| | AACTGACATACGCGTATCCGTCTAAAAATCAATCTCATTTCCTGGTAGTGAAATATATATTAAACCAGGA |
| | AATGAGATTGATTTTTTTACGGTAACGCGGAATTCGCAACTATTTTATCAATTTTTTGCGTCGACGACTG |
| | TGACAGCAGAGTATGCCGGATCAACGCCCTAGGTTTATGTTTGGATGAACTGACATACGCGTATCCGTCT |
| | TATGTAAAAGACAAACAATGCGTAGTGAAATATATATTAAACGCATTGTTTGTCTTTTACATATTACGGT |
| | AACGCGGAATTCGCAACTATTTTATCAATTTTTTGCGTCGACCGGAACTATCTTGAAGAGTAGTAGTGGa |
| | ctagtgtgacgctgctgacccctttctttcccttctACAGATCCAAGCTGTGACCGGCGCCTACacctgc |
| | agcccaagcttaccatggccttaccagtgaccgccttgctcctgccgctggccttgctgctccacgccgc |
| | caggcctGAGATAGTCCTGACCCAGTCACCCGATTTCCAGAGTGTTACTCCTAAGGAGAAAGTGACTATA |
| | ACATGCCGGGCATCTCAGTCTGTCGGAAGCGGGCTACATTGGTACCAGCAGAAGCCTGACCAGAGCCCGA |
| | AACTGCTCATCAAATATGCCTCCCAGTCGTTTTCTGGCGTGCCCTCTCGCTTTTCCGGAAGCGGATCTGG |
| | CACAGACTTCACCTTGACCATCAATAGCCTGGAAACTGAGGACGCCGCTACGTATTTCTGCCAGCAGTCC |
| | TCCAGTCTGCCTTGGACATTTGGTCAGGGAACGAAGGTGGAGATCAAGGGTTCAACATCAGGGAGCGGGA |
| | AACCGGGCTCTGGCGAGGGCTCAACAAAGGGACAAGTGCAACTGCAAGAATCGGGACCCGGGCTGGTTAA |
| | ACCAAGTGAAACCCTTTCCCTCACTTGTACCGTAAGCGGCGGTAGCGTGTCCTCTGGTAGCTACTATTGG |
| | AGTTGGATTAGGCAGGCGCCAGGGAAAGGCCTCGAATGGATTGGGTATATCTACTACAGCGGCAGTAACT |
| | ACTACAACCCATCATTGAAGTCTAGAGTGACAATTAGTGTCGATACCTCTAAAAATCAATTCTCACTTAA |
| | GCTGCGAGCTGTAACCGCCGCAGACACTGCGGTGTACTATTGTGCCCGTTGGATGACCACTATCAAGGGC |
| | TACTTCGATTATTGGGGACAAGGGACATTAGTTACGGTGTCCTCCGCAACCAcgacgccagcgccgcgac |
| | caccaacaccggcgcccaccatcgcgtcgcagcccctgtccctgcgcccTgaggcgtgcttcatgtacgt |
| | ggcggcggccgcctttgtgcttctgttcttcgtgggctgcggggtgctgctgtcccgtaaacgCagacgt |
| | caacacggtcaactgtggtttccagaaggttttaaggtctccgaagcaagtaagaagaaaagacgtgaac |
| | cactgggagaagatagcgtcggtctgaaaccactcaagaatgccatggtttctaaactgagccagctgca |
| | gacggagctcctggcggccctgctggagtcagggctgagcaaagaggcactgctccaggcactgggCgag |
| | ccggggccctacctcctggctggagaaggccccctggacaagggggagtcctgcggcggcggtcgagggg |
| | agctggctgagctgcccaatgggctgggggagactcggggctccgaggacgagacCgacgacgatgggga |
| | agacttcacgccacccatcctcaaagagctggagaacctcagccctgaggaggcggcccaccagaaagcc |
| | gtggtggagacccttctgcaggaggacccgtggcgtgtggcgaagatggtcaagtcctacctgcagcagc |
| | acaacatcccacagcgggaggtggtcgataccactggcctcaaccagtcccacctgtcccaacacctcaa |
| | caagggcactcccatgaagacgcagaagcgggccgccctgtacacctggtaTgtccgcaagcagcgagag |
| | gtggcgcagcagttcacccatgcagggcagggagggctgattgaAgaGcccacaggAgatgagctaccaa |
| | ccaagaaggggcggaggaaccgtttcaagtggggcccagcatcccagcagatcctgttccaggcctatga |
| | gaggcagaagaaccctagcaaggaggagcgagaAacgctagtggaggagtgcaatagggcggaatgcatc |
| | cagagaggTgtgtcAccatcacaAgcacaAggTctgggctccaacctcgtcacggaggtgcgtgtctaca |
| | actggtttgccaaccggcgcaaagaagaagccttccggcacaagctggccatgacctgcagggatgagtt |
| | tcccaccatggtgtttccttctgggcagatcagccaggcctcggccttggccccggcccctccccaagtc |
| | ctgccccaggctccagcccctgcccctgctccagccatggtatcagctctggcccaggccccagcccctg |
| | tcccagtcctagccccaggccctcctcaAgctgtggccccacctgcccccaagcccacccaAgctgggga |
| | aggaacgctgtcagaggccctgctgcagctgcagtttgatgatgaagacctgggggccttgcttggcaac |
| | agcacagacccagctgtgttcacagacctggcatccgtcgacaactccgagtttcagcagctgctgaacc |
| | agggcatacctgtggccccccacacaactgagcccatgctgatggagtaccctgaggctataactcgcct |
| | agtgacaggggcccagaggccccccgacccagctcctgctccactgggggccccggggctccccaatggc |
| | ctcctttcaggagatgaagacttctcctccattgcggacatggacttctcagccctgctgagtcagatca |
| | gctcc |
| LG 39 | cgactgtgccttctagttgccagccatctgttgtttgcccctcccccgtgccttccttgaccctggaagg |
| core | tgccactcccactgtcctttcctaataaaatgaggaaattgcatcgcattgtctgagtaggtgtcattct |
| insert | attctggggggtggggtggggcaggacagcaagggggaggattgggaagacaatagcaggcatgctgggg |
| (w/o | atgcggtgggctctatgggataagcttgatatcgaattcatcgatgttaataattaacatatatgttaat |
| homology | cattaacatatagttaattattaaccgctatgttaatgattaacaacggttaataattaacatatatgtt |
| wings) | aatcattaacatataactagtctagagggtatataatgggggccactagtctactaccagagTtcatcgc |
| SEQ ID | tagcgctaccggatccgccaccATGGCCCTGCCAGTAACGGCTCTGCTGCTGCCACTTGCTCTGCTCCTC |
| NO: 1240 | CATGCAGCCAGGCCTCAGGTCCAGTTGGTACAGAGCGGCGCCGAAGTGAAAAAGCCTGGGGCGTCCGTCA |
| | AAGTGTCTTGCAAGGCCTCCGGCTATACATTCACCGGGTACTACATGCATTGGGTGCGGCAGGCACCTGG |
| | CCAGGGTCTAGAATGGATGGGCCGGATCAATCCCAACTCCGGCGGCACAAACTATGCTCAGAAATTTCAA |
| | GGTCGCGTCACCATGACCCGTGACACAAGTACGAGCACCGTCTACATGGAGCTGTCCTCCCTCAGGAGCG |
| | AGGATACAGCCGTGTACTATTGTGCAAGGGAGCGCGCCGGCTATAGCAGCGGGCAGTTCGATTATTGGGG |
| | ACAAGGGACTCTGGTAACTGTGTCCTCCGGAGGCGGAGGATCAGGCGGAGGAGGCTCAGGAGGTGGAGGT |
| | TCTGACATTCAGATGACTCAATCTCCCTCGTCACTGTCAGCTAGTGTTGGGGATAGAGTGACTATTACCT |
| | GCCGAGCCAGTCAGTCAATATCTAACTGGCTCGCATGGTACCAGCAGAAGCCAGGGAAGGCTCCCAAACT |
| | GCTGATCTACGCCGCGAGCACCCTTCAGAATGGCGTGCCGTCTAGATTTAGCGGTTCTGGGTCTGGGACC |
| | GACTTTACACTTACTATCAGTAGTTTACAACCAGAGGACTTTGCTACTTATTACTGTCAACAGAGCTACA |
| | CCTTCCCTATTACGTTCGGCCAGGGAACAAAAGTTGAAATCAAGGCGGCAGCAaccacgacgccagcgcc |
| | gcgaccaccaacaccggcgcccaccatcgcgtcgcagccactgtcactgcgcccagaagcgtgccggcca |
| | gcggcggggggcgcagtgcaTacgagggggctggacttcgcctgtgatatctacatctgggcgcccttgg |
| | ccgggacttgtggggtccttctcctgtcactggttatcaccctttactgcaaacggggcagaaagaaact |
| | cctgtatatattcaaacaaccatttatgagaccagtacaaactactcaagaagaggacggctgtagctgc |
| | cgatttccagaagaagaagaaggaggatgtgaactgagagtgaagttcagcaggagcgcagacgcccccg |
| | cgtaccagcagggccagaaccagctctataacgagctcaatctaggacgaagagaggagtacgatgtttt |
| | ggacaagaggcgtggccgggaccctgagatggggggaaagccgagaaggaagaaccctcaggaaggcctg |
| | tacaatgaactgcagaaagataagatggcggaggcctacagtgagattgggatgaaaggcgagcgccgga |
| | ggggcaaggggcacgatggcctttaccagggtctcagtacagccaccaaggacacctacgacgcccttca |
| | catgcaggccctgccccctaggtaaaatcaacctctggattacaaaatttgtgaaagattgactggtatt |
| | cttaactatgttgctccttttacgctatgtggatacgctgctttaatgcctttgtatcatgctattgctt |
| | cccgtatggctttcattttctcctccttgtataaatcctggttgctgtctctttatgaggagttgtggcc |
| | cgttgtcaggcaacgtggcgtggtCtgcactgtgtttgctgacgcaacccccactggttggggcattgcc |
| | accacctgtcagctcctttccgggactttcgctttccccctccctattgccacggcggaactcatcgccg |
| | cctgccttgcccgctgctggacaggggctcggctgttgggcactgacaattccgtggtgttgtcggggaa |
| | atcatcgtcctttccttggctgctcgcctgtgttgccacctggattctgcgcgggacgtccttctgctac |
| | gtcccttcggccctcaatccagcggaccttccttcccgcggcctgctgccggctctgcggcctcttccgc |
| | gtcttcgccttcgccctcagacgagtcggatctccctttgggccgcctccccgcctggatccttgacttg |
| | cggccaacttgtttattgcagcttataatggttacaaataaagcaatagcatcacaaatttcacaaataa |
| | agcatttttttcactgcattctagttgtggtttgtccaaactcatcaatgtatcttatcatgtctgggat |
| | ccttgacttgcggccgcaactcccacctgcaacatgcgtgactgactgaggccgcgactctagagtcgac |
| | cggatctgcgatcgctccggtgcccgtcagtgggcagagcgcacatcgcccacagtccccgagaagttgg |
| | ggggaggggtcggcaattgaacgggtgcctagagaaggtggcgcggggtaaactgggaaagtgatgtcgt |
| | gtactggctccgcctttttcccgagggtgggggagaaccgtatataagtgcagtagtcgccgtgaacgtt |
| | ctttttcgcaacgggtttgccgccagaacacagctgaagcttcgaggggctcgcatctctccttcacgcg |
| | cccgccgccctacctgaggccgccatccacgccggttgagtcgcgttctgccgcctcccgcctgtggtgc |
| | ctcctgaactgcgtccgccgtctaggtaaGTcgactcgttggatccCCACTACCCGGATCAACGCCCTAG |
| | GTTTATGTTTGGATGAACTGACATACGCGTATCCGTCTTAAGAATCTTTTCAAACACTAGTAGTGAAATA |
| | TATATTAAACTAGTGTTTGAAAAGATTCTTATTACGGTAACGCGGAATTCGCAACTATTTTATCAATTTT |
| | TTGCGTCGACACTTCAAGGGGCTTGCGGCCGCAACCATCTCCATGGCTGTTTGAATGAGGCTTCAGTACT |
| | TTACAGAATCGTTGCCTGCACATCTTGGAAACACTTGCTGGGATTACTTCGACTTCTTAACCCAACAGAA |
| | GGCTCGAGAAGGTATATTGCTGTTGACAGTGAGCGCCAGTGTGAAGCTCTTGTCAGATAGTGAAGCCACA |
| | GATGTATCTGACAAGAGCTTCACACTGATGCCTACTGCCTCGGACTTCAAGGGGCTAGAATTCGAGCAAT |
| | TATCTTGTTTACTAAAACTGAATACCTTGCTATCTCTTTGATACATTTTTACAAAGCTGAATTAAAATGG |
| | TATAAATTAAATCACTTTGACGGTGACTTAGGAGTATGCCGGATCAACGCCCTAGGTTTATGTTTGGATG |
| | AACTGACATACGCGTATCCGTCTAAAAATCAATCTCATTTCCTGGTAGTGAAATATATATTAAACCAGGA |
| | AATGAGATTGATTTTTTTACGGTAACGCGGAATTCGCAACTATTTTATCAATTTTTTGCGTCGACGACTG |
| | TGACAGCAGAGTATGCCGGATCAACGCCCTAGGTTTATGTTTGGATGAACTGACATACGCGTATCCGTCT |
| | TATGTAAAAGACAAACAATGCGTAGTGAAATATATATTAAACGCATTGTTTGTCTTTTACATATTACGGT |
| | AACGCGGAATTCGCAACTATTTTATCAATTTTTTGCGTCGACCGGAACTATCTTGAAGAGTAGTAGTGGa |
| | ctagtgtgacgctgctgacccctttctttcccttctACAGATCCAAGCTGTGACCGGCGCCTACacctgc |
| | agcccaagcttaccatggccttaccagtgaccgccttgctcctgccgctggccttgctgctccacgccgc |
| | caggcctGAAATCGTCCTGACACAGTCTCCAGATTTTCAGAGCGTGACGCCAAAGGAGAAAGTGACAATT |
| | ACATGCCGGGCATCTCAGTCTGTTGGGTCTGGGTTGCATTGGTATCAGCAAAAGCCCGACCAGTCACCCA |
| | AACTGCTCATCAAATATGCAAGCCAGAGTTTTTCAGGCGTACCTTCACGATTTAGCGGAAGTGGTTCTGG |
| | CACTGACTTCACCTTGACGATTAATAGCCTGGAAGTAGAAGACGCTGCCACTTTCTACTGCCTGCAAAGT |
| | AGCTCCCTGCCCTGGACTTTTGGGCAGGGTACTAAGGTCGAGATCAAGGGCTCGACAAGCGGAAGTGGCA |
| | AACCGGGCAGCGGCGAGGGAAGCACCAAGGGACAAGTGCAACTGCAAGAGTCTGGACCCGGGCTGGTGAA |
| | ACCAAGCGAGACATTATCCCTCACTTGTACCGTGTCAGGCGGTAGTGTGTCCTCCGGGAATTTCTACTGG |
| | AGTTGGATACGCCAGCCTCCTGGGAAGGGCCTTGAATGGATTGGCTACATCTACTATTCAGGCTCCACCT |
| | ACTACAACCCGTCTTTGAAGTCAAGGGTTACGATAAGCGTCGATACCTCCAAAAACCAATTCTCCCTAAA |
| | GCTCAGATCGTTAACTGCCGCTGATACCGCGGTGTACTATTGTGCCCGTTGGATGACCAAAGTTAAGGGT |
| | TATTTCGACTATTGGGGACAAGGGACACTTGTCACCGTGTCCTCCGCAACCAcgacgccagcgccgcgac |
| | caccaacaccggcgcccaccatcgcgtcgcagcccctgtccctgcgcccTgaggcgtgcttcatgtacgt |
| | ggcggcggccgcctttgtgcttctgttcttcgtgggctgcggggtgctgctgtcccgtaaacgCagacgt |
| | caacacggtcaactgtggtttccagaaggttttaaggtctccgaagcaagtaagaagaaaagacgtgaac |
| | cactgggagaagatagcgtcggtctgaaaccactcaagaatgccatggtttctaaactgagccagctgca |
| | gacggagctcctggcggccctgctggagtcagggctgagcaaagaggcactgctccaggcactgggCgag |
| | ccggggccctacctcctggctggagaaggccccctggacaagggggagtcctgcggcggcggtcgagggg |
| | agctggctgagctgcccaatgggctgggggagactcggggctccgaggacgagacCgacgacgatgggga |
| | agacttcacgccacccatcctcaaagagctggagaacctcagccctgaggaggcggcccaccagaaagcc |
| | gtggtggagacccttctgcaggaggacccgtggcgtgtggcgaagatggtcaagtcctacctgcagcagc |
| | acaacatcccacagcgggaggtggtcgataccactggcctcaaccagtcccacctgtcccaacacctcaa |
| | caagggcactcccatgaagacgcagaagcgggccgccctgtacacctggtaTgtccgcaagcagcgagag |
| | gtggcgcagcagttcacccatgcagggcagggagggctgattgaAgaGcccacaggAgatgagctaccaa |
| | ccaagaaggggcggaggaaccgtttcaagtggggcccagcatcccagcagatcctgttccaggcctatga |
| | gaggcagaagaaccctagcaaggaggagcgagaAacgctagtggaggagtgcaatagggcggaatgcatc |
| | cagagaggTgtgtcAccatcacaAgcacaAggTctgggctccaacctcgtcacggaggtgcgtgtctaca |
| | actggtttgccaaccggcgcaaagaagaagccttccggcacaagctggccatgacctgcagggatgagtt |
| | tcccaccatggtgtttccttctgggcagatcagccaggcctcggccttggccccggcccctccccaagtc |
| | ctgccccaggctccagcccctgcccctgctccagccatggtatcagctctggcccaggccccagcccctg |
| | tcccagtcctagccccaggccctcctcaAgctgtggccccacctgcccccaagcccacccaAgctgggga |
| | aggaacgctgtcagaggccctgctgcagctgcagtttgatgatgaagacctgggggccttgcttggcaac |
| | agcacagacccagctgtgttcacagacctggcatccgtcgacaactccgagtttcagcagctgctgaacc |
| | agggcatacctgtggccccccacacaactgagcccatgctgatggagtaccctgaggctataactcgcct |
| | agtgacaggggcccagaggccccccgacccagctcctgctccactgggggccccggggctccccaatggc |
| | ctcctttcaggagatgaagacttctcctccattgcggacatggacttctcagccctgctgagtcagatca |
| | gctcc |
| LG 43 | cgactgtgccttctagttgccagccatctgttgtttgcccctcccccgtgccttccttgaccctggaagg |
| core | tgccactcccactgtcctttcctaataaaatgaggaaattgcatcgcattgtctgagtaggtgtcattct |
| insert | attctggggggtggggtggggcaggacagcaagggggaggattgggaagacaatagcaggcatgctgggg |
| (w/o | atgcggtgggctctatgggataagcttgatatcgaattcatcgatgttaataattaacatatatgttaat |
| homology | cattaacatatagttaattattaaccgctatgttaatgattaacaacggttaataattaacatatatgtt |
| wings) | aatcattaacatataactagtctagagggtatataatgggggccactagtctactaccagagTtcatcgc |
| SEQ ID | tagcgctaccggatccgccaccATGGCCCTGCCAGTAACGGCTCTGCTGCTGCCACTTGCTCTGCTCCTC |
| NO: 1241 | CATGCAGCCAGGCCTCAAGTGCAGCTGGTCCAGTCTGGGGCGGAAGTGAAAAAGCCCGGAGCTAGTGTAA |
| | AGGTGTCCTGTAAAGCCAGCGGCTACACCTTCACCGGTTATTACCTGCATTGGGTCCGGCAGGCTCCTGG |
| | CCAGGGCCTGGAGTGGATGGGCTGGATTTCCGCATATAACGGAAACACAAATTACGCCCAGAACCTGCAA |
| | GGCCGCGTGACCATGACCAGGGACACAAGCACTAGCACTGTCTACATGGAGTTGTCTAGCTTGAGAAGCG |
| | AAGATACCGCTGTGTACTATTGCGCCCGACACTCTTACTCGGGCTCATACTCAACGCTACCCTATTATGG |
| | GATGGATGTTTGGGGTCAAGGGACAACGGTCACAGTATCCTCTGGAGGCGGTGGCAGCGGAGGAGGCGGG |
| | TCTGGAGGTGGTGGATCAGACATTCAGATGACCCAGTCACCAAGTTCCTTATCCGCAAGCGTTGGGGATC |
| | GTGTTACAATTACTTGCAGGGCCTCGCAAGGGATCTCTAATTATCTCGCTTGGTACCAGCAGAAACCTGG |
| | GAAAGCACCCAAGCTGCTGATCTACACTGCAAGCACACTTTTTCCAGGAGTGCCGTCAAGATTCTCTGGG |
| | TCCGGGAGTGGCACTGACTTCACCCTTACCATCTCCTCCCTCCAGCCTGAGGACTTTGCCACATATTATT |
| | GTCAACAGAGTTACTCCATACCACTCACGTTTGGCGGCGGAACAAAaGTtGAAATCAAGGCGGCAGCAac |
| | cacgacgccagcgccgcgaccaccaacaccggcgcccaccatcgcgtcgcagccactgtcactgcgccca |
| | gaagcgtgccggccagcggcggggggcgcagtgcaTacgagggggctggacttcgcctgtgatatctaca |
| | tctgggcgcccttggccgggacttgtggggtccttctcctgtcactggttatcaccctttactgcaaacg |
| | gggcagaaagaaactcctgtatatattcaaacaaccatttatgagaccagtacaaactactcaagaagag |
| | gacggctgtagctgccgatttccagaagaagaagaaggaggatgtgaactgagagtgaagttcagcagga |
| | gcgcagacgcccccgcgtaccagcagggccagaaccagctctataacgagctcaatctaggacgaagaga |
| | ggagtacgatgttttggacaagaggcgtggccgggaccctgagatggggggaaagccgagaaggaagaac |
| | cctcaggaaggcctgtacaatgaactgcagaaagataagatggcggaggcctacagtgagattgggatga |
| | aaggcgagcgccggaggggcaaggggcacgatggcctttaccagggtctcagtacagccaccaaggacac |
| | ctacgacgcccttcacatgcaggccctgccccctaggtaaaatcaacctctggattacaaaatttgtgaa |
| | agattgactggtattcttaactatgttgctccttttacgctatgtggatacgctgctttaatgcctttgt |
| | atcatgctattgcttcccgtatggctttcattttctcctccttgtataaatcctggttgctgtctcttta |
| | tgaggagttgtggcccgttgtcaggcaacgtggcgtggtCtgcactgtgtttgctgacgcaacccccact |
| | ggttggggcattgccaccacctgtcagctcctttccgggactttcgctttccccctccctattgccacgg |
| | cggaactcatcgccgcctgccttgcccgctgctggacaggggctcggctgttgggcactgacaattccgt |
| | ggtgttgtcggggaaatcatcgtcctttccttggctgctcgcctgtgttgccacctggattctgcgcggg |
| | acgtccttctgctacgtcccttcggccctcaatccagcggaccttccttcccgcggcctgctgccggctc |
| | tgcggcctcttccgcgtcttcgccttcgccctcagacgagtcggatctccctttgggccgcctccccgcc |
| | tggatccttgacttgcggccaacttgtttattgcagcttataatggttacaaataaagcaatagcatcac |
| | aaatttcacaaataaagcatttttttcactgcattctagttgtggtttgtccaaactcatcaatgtatct |
| | tatcatgtctgggatccttgacttgcggccgcaactcccacctgcaacatgcgtgactgactgaggccgc |
| | gactctagagtcgaccggatctgcgatcgctccggtgcccgtcagtgggcagagcgcacatcgcccacag |
| | tccccgagaagttggggggaggggtcggcaattgaacgggtgcctagagaaggtggcgcggggtaaactg |
| | ggaaagtgatgtcgtgtactggctccgcctttttcccgagggtgggggagaaccgtatataagtgcagta |
| | gtcgccgtgaacgttctttttcgcaacgggtttgccgccagaacacagctgaagcttcgaggggctcgca |
| | tctctccttcacgcgcccgccgccctacctgaggccgccatccacgccggttgagtcgcgttctgccgcc |
| | tcccgcctgtggtgcctcctgaactgcgtccgccgtctaggtaaGTcgactcgttggatccCCACTACCC |
| | GGATCAACGCCCTAGGTTTATGTTTGGATGAACTGACATACGCGTATCCGTCTTAAGAATCTTTTCAAAC |
| | ACTAGTAGTGAAATATATATTAAACTAGTGTTTGAAAAGATTCTTATTACGGTAACGCGGAATTCGCAAC |
| | TATTTTATCAATTTTTTGCGTCGACACTTCAAGGGGCTTGCGGCCGCAACCATCTCCATGGCTGTTTGAA |
| | TGAGGCTTCAGTACTTTACAGAATCGTTGCCTGCACATCTTGGAAACACTTGCTGGGATTACTTCGACTT |
| | CTTAACCCAACAGAAGGCTCGAGAAGGTATATTGCTGTTGACAGTGAGCGCCAGTGTGAAGCTCTTGTCA |
| | GATAGTGAAGCCACAGATGTATCTGACAAGAGCTTCACACTGATGCCTACTGCCTCGGACTTCAAGGGGC |
| | TAGAATTCGAGCAATTATCTTGTTTACTAAAACTGAATACCTTGCTATCTCTTTGATACATTTTTACAAA |
| | GCTGAATTAAAATGGTATAAATTAAATCACTTTGACGGTGACTTAGGAGTATGCCGGATCAACGCCCTAG |
| | GTTTATGTTTGGATGAACTGACATACGCGTATCCGTCTAAAAATCAATCTCATTTCCTGGTAGTGAAATA |
| | TATATTAAACCAGGAAATGAGATTGATTTTTTTACGGTAACGCGGAATTCGCAACTATTTTATCAATTTT |
| | TTGCGTCGACGACTGTGACAGCAGAGTATGCCGGATCAACGCCCTAGGTTTATGTTTGGATGAACTGACA |
| | TACGCGTATCCGTCTTATGTAAAAGACAAACAATGCGTAGTGAAATATATATTAAACGCATTGTTTGTCT |
| | TTTACATATTACGGTAACGCGGAATTCGCAACTATTTTATCAATTTTTTGCGTCGACCGGAACTATCTTG |
| | AAGAGTAGTAGTGGactagtgtgacgctgctgacccctttctttcccttctACAGATCCAAGCTGTGACC |
| | GGCGCCTACacctgcagcccaagcttaccatggccttaccagtgaccgccttgctcctgccgctggcctt |
| | gctgctccacgccgccaggcctGAGATAGTCCTGACCCAGTCACCCGATTTCCAGAGTGTTACTCCTAAG |
| | GAGAAAGTGACTATAACATGCCGGGCATCTCAGTCTGTCGGAAGCGGGCTACATTGGTACCAGCAGAAGC |
| | CTGACCAGAGCCCGAAACTGCTCATCAAATATGCCTCCCAGTCGTTTTCTGGCGTGCCCTCTCGCTTTTC |
| | CGGAAGCGGATCTGGCACAGACTTCACCTTGACCATCAATAGCCTGGAAACTGAGGACGCCGCTACGTAT |
| | TTCTGCCAGCAGTCCTCCAGTCTGCCTTGGACATTTGGTCAGGGAACGAAGGTGGAGATCAAGGGTTCAA |
| | CATCAGGGAGCGGGAAACCGGGCTCTGGCGAGGGCTCAACAAAGGGACAAGTGCAACTGCAAGAATCGGG |
| | ACCCGGGCTGGTTAAACCAAGTGAAACCCTTTCCCTCACTTGTACCGTAAGCGGCGGTAGCGTGTCCTCT |
| | GGTAGCTACTATTGGAGTTGGATTAGGCAGGCGCCAGGGAAAGGCCTCGAATGGATTGGGTATATCTACT |
| | ACAGCGGCAGTAACTACTACAACCCATCATTGAAGTCTAGAGTGACAATTAGTGTCGATACCTCTAAAAA |
| | TCAATTCTCACTTAAGCTGCGAGCTGTAACCGCCGCAGACACTGCGGTGTACTATTGTGCCCGTTGGATG |
| | ACCACTATCAAGGGCTACTTCGATTATTGGGGACAAGGGACATTAGTTACGGTGTCCTCCGCAACCAcga |
| | cgccagcgccgcgaccaccaacaccggcgcccaccatcgcgtcgcagcccctgtccctgcgcccTgaggc |
| | gtgcttcatgtacgtggcggcggccgcctttgtgcttctgttcttcgtgggctgcggggtgctgctgtcc |
| | cgtaaacgCagacgtcaacacggtcaactgtggtttccagaaggttttaaggtctccgaagcaagtaaga |
| | agaaaagacgtgaaccactgggagaagatagcgtcggtctgaaaccactcaagaatgccatggtttctaa |
| | actgagccagctgcagacggagctcctggcggccctgctggagtcagggctgagcaaagaggcactgctc |
| | caggcactgggCgagccggggccctacctcctggctggagaaggccccctggacaagggggagtcctgcg |
| | gcggcggtcgaggggagctggctgagctgcccaatgggctgggggagactcggggctccgaggacgagac |
| | Cgacgacgatggggaagacttcacgccacccatcctcaaagagctggagaacctcagccctgaggaggcg |
| | gcccaccagaaagccgtggtggagacccttctgcaggaggacccgtggcgtgtggcgaagatggtcaagt |
| | cctacctgcagcagcacaacatcccacagcgggaggtggtcgataccactggcctcaaccagtcccacct |
| | gtcccaacacctcaacaagggcactcccatgaagacgcagaagcgggccgccctgtacacctggtaTgtc |
| | cgcaagcagcgagaggtggcgcagcagttcacccatgcagggcagggagggctgattgaAgaGcccacag |
| | gAgatgagctaccaaccaagaaggggcggaggaaccgtttcaagtggggcccagcatcccagcagatcct |
| | gttccaggcctatgagaggcagaagaaccctagcaaggaggagcgagaAacgctagtggaggagtgcaat |
| | agggcggaatgcatccagagaggTgtgtcAccatcacaAgcacaAggTctgggctccaacctcgtcacgg |
| | aggtgcgtgtctacaactggtttgccaaccggcgcaaagaagaagccttccggcacaagctggccatgac |
| | ctgcagggatgagtttcccaccatggtgtttccttctgggcagatcagccaggcctcggccttggccccg |
| | gcccctccccaagtcctgccccaggctccagcccctgcccctgctccagccatggtatcagctctggccc |
| | aggccccagcccctgtcccagtcctagccccaggccctcctcaAgctgtggccccacctgcccccaagcc |
| | cacccaAgctggggaaggaacgctgtcagaggccctgctgcagctgcagtttgatgatgaagacctgggg |
| | gccttgcttggcaacagcacagacccagctgtgttcacagacctggcatccgtcgacaactccgagtttc |
| | agcagctgctgaaccagggcatacctgtggccccccacacaactgagcccatgctgatggagtaccctga |
| | ggctataactcgcctagtgacaggggcccagaggccccccgacccagctcctgctccactgggggccccg |
| | gggctccccaatggcctcctttcaggagatgaagacttctcctccattgcggacatggacttctcagccc |
| | tgctgagtcagatcagctcc |
| LG 47 | cgactgtgccttctagttgccagccatctgttgtttgcccctcccccgtgccttccttgaccctggaagg |
| core | tgccactcccactgtcctttcctaataaaatgaggaaattgcatcgcattgtctgagtaggtgtcattct |
| insert | attctggggggtggggtggggcaggacagcaagggggaggattgggaagacaatagcaggcatgctgggg |
| (w/o | atgcggtgggctctatgggataagcttgatatcgaattcatcgatgttaataattaacatatatgttaat |
| homology | cattaacatatagttaattattaaccgctatgttaatgattaacaacggttaataattaacatatatgtt |
| wings) | aatcattaacatataactagtctagagggtatataatgggggccactagtctactaccagagTtcatcgc |
| SEQ ID | tagcgctaccggatccgccaccATGGCCCTGCCAGTAACGGCTCTGCTGCTGCCACTTGCTCTGCTCCTC |
| NO: 1242 | CATGCAGCCAGGCCTCAGGTCCAGTTGGTACAGAGCGGCGCCGAAGTGAAAAAGCCTGGGGCGTCCGTCA |
| | AAGTGTCTTGCAAGGCCTCCGGCTATACATTCACCGGGTACTACATGCATTGGGTGCGGCAGGCACCTGG |
| | CCAGGGTCTAGAATGGATGGGCCGGATCAATCCCAACTCCGGCGGCACAAACTATGCTCAGAAATTTCAA |
| | GGTCGCGTCACCATGACCCGTGACACAAGTACGAGCACCGTCTACATGGAGCTGTCCTCCCTCAGGAGCG |
| | AGGATACAGCCGTGTACTATTGTGCAAGGGAGCGCGCCGGCTATAGCAGCGGGCAGTTCGATTATTGGGG |
| | ACAAGGGACTCTGGTAACTGTGTCCTCCGGAGGCGGAGGATCAGGCGGAGGAGGCTCAGGAGGTGGAGGT |
| | TCTGACATTCAGATGACTCAATCTCCCTCGTCACTGTCAGCTAGTGTTGGGGATAGAGTGACTATTACCT |
| | GCCGAGCCAGTCAGTCAATATCTAACTGGCTCGCATGGTACCAGCAGAAGCCAGGGAAGGCTCCCAAACT |
| | GCTGATCTACGCCGCGAGCACCCTTCAGAATGGCGTGCCGTCTAGATTTAGCGGTTCTGGGTCTGGGACC |
| | GACTTTACACTTACTATCAGTAGTTTACAACCAGAGGACTTTGCTACTTATTACTGTCAACAGAGCTACA |
| | CCTTCCCTATTACGTTCGGCCAGGGAACAAAAGTTGAAATCAAGGCGGCAGCAaccacgacgccagcgcc |
| | gcgaccaccaacaccggcgcccaccatcgcgtcgcagccactgtcactgcgcccagaagcgtgccggcca |
| | gcggcggggggcgcagtgcaTacgagggggctggacttcgcctgtgatatctacatctgggcgcccttgg |
| | ccgggacttgtggggtccttctcctgtcactggttatcaccctttactgcaaacggggcagaaagaaact |
| | cctgtatatattcaaacaaccatttatgagaccagtacaaactactcaagaagaggacggctgtagctgc |
| | cgatttccagaagaagaagaaggaggatgtgaactgagagtgaagttcagcaggagcgcagacgcccccg |
| | cgtaccagcagggccagaaccagctctataacgagctcaatctaggacgaagagaggagtacgatgtttt |
| | ggacaagaggcgtggccgggaccctgagatggggggaaagccgagaaggaagaaccctcaggaaggcctg |
| | tacaatgaactgcagaaagataagatggcggaggcctacagtgagattgggatgaaaggcgagcgccgga |
| | ggggcaaggggcacgatggcctttaccagggtctcagtacagccaccaaggacacctacgacgcccttca |
| | catgcaggccctgccccctaggtaaaatcaacctctggattacaaaatttgtgaaagattgactggtatt |
| | cttaactatgttgctccttttacgctatgtggatacgctgctttaatgcctttgtatcatgctattgctt |
| | cccgtatggctttcattttctcctccttgtataaatcctggttgctgtctctttatgaggagttgtggcc |
| | cgttgtcaggcaacgtggcgtggtCtgcactgtgtttgctgacgcaacccccactggttggggcattgcc |
| | accacctgtcagctcctttccgggactttcgctttccccctccctattgccacggcggaactcatcgccg |
| | cctgccttgcccgctgctggacaggggctcggctgttgggcactgacaattccgtggtgttgtcggggaa |
| | atcatcgtcctttccttggctgctcgcctgtgttgccacctggattctgcgcgggacgtccttctgctac |
| | gtcccttcggccctcaatccagcggaccttccttcccgcggcctgctgccggctctgcggcctcttccgc |
| | gtcttcgccttcgccctcagacgagtcggatctccctttgggccgcctccccgcctggatccttgacttg |
| | cggccaacttgtttattgcagcttataatggttacaaataaagcaatagcatcacaaatttcacaaataa |
| | agcatttttttcactgcattctagttgtggtttgtccaaactcatcaatgtatcttatcatgtctgggat |
| | ccttgacttgcggccgcaactcccacctgcaacatgcgtgactgactgaggccgcgactctagagtcgac |
| | cggatctgcgatcgctccggtgcccgtcagtgggcagagcgcacatcgcccacagtccccgagaagttgg |
| | ggggaggggtcggcaattgaacgggtgcctagagaaggtggcgcggggtaaactgggaaagtgatgtcgt |
| | gtactggctccgcctttttcccgagggtgggggagaaccgtatataagtgcagtagtcgccgtgaacgtt |
| | ctttttcgcaacgggtttgccgccagaacacagctgaagcttcgaggggctcgcatctctccttcacgcg |
| | cccgccgccctacctgaggccgccatccacgccggttgagtcgcgttctgccgcctcccgcctgtggtgc |
| | ctcctgaactgcgtccgccgtctaggtaaGTcgactcgttggatccCCACTACCCGGATCAACGCCCTAG |
| | GTTTATGTTTGGATGAACTGACATACGCGTATCCGTCTTAAGAATCTTTTCAAACACTAGTAGTGAAATA |
| | TATATTAAACTAGTGTTTGAAAAGATTCTTATTACGGTAACGCGGAATTCGCAACTATTTTATCAATTTT |
| | TTGCGTCGACACTTCAAGGGGCTTGCGGCCGCAACCATCTCCATGGCTGTTTGAATGAGGCTTCAGTACT |
| | TTACAGAATCGTTGCCTGCACATCTTGGAAACACTTGCTGGGATTACTTCGACTTCTTAACCCAACAGAA |
| | GGCTCGAGAAGGTATATTGCTGTTGACAGTGAGCGCCAGTGTGAAGCTCTTGTCAGATAGTGAAGCCACA |
| | GATGTATCTGACAAGAGCTTCACACTGATGCCTACTGCCTCGGACTTCAAGGGGCTAGAATTCGAGCAAT |
| | TATCTTGTTTACTAAAACTGAATACCTTGCTATCTCTTTGATACATTTTTACAAAGCTGAATTAAAATGG |
| | TATAAATTAAATCACTTTGACGGTGACTTAGGAGTATGCCGGATCAACGCCCTAGGTTTATGTTTGGATG |
| | AACTGACATACGCGTATCCGTCTAAAAATCAATCTCATTTCCTGGTAGTGAAATATATATTAAACCAGGA |
| | AATGAGATTGATTTTTTTACGGTAACGCGGAATTCGCAACTATTTTATCAATTTTTTGCGTCGACGACTG |
| | TGACAGCAGAGTATGCCGGATCAACGCCCTAGGTTTATGTTTGGATGAACTGACATACGCGTATCCGTCT |
| | TATGTAAAAGACAAACAATGCGTAGTGAAATATATATTAAACGCATTGTTTGTCTTTTACATATTACGGT |
| | AACGCGGAATTCGCAACTATTTTATCAATTTTTTGCGTCGACCGGAACTATCTTGAAGAGTAGTAGTGGa |
| | ctagtgtgacgctgctgacccctttctttcccttctACAGATCCAAGCTGTGACCGGCGCCTACacctgc |
| | agcccaagcttaccatggccttaccagtgaccgccttgctcctgccgctggccttgctgctccacgccgc |
| | caggcctGAGATAGTCCTGACCCAGTCACCCGATTTCCAGAGTGTTACTCCTAAGGAGAAAGTGACTATA |
| | ACATGCCGGGCATCTCAGTCTGTCGGAAGCGGGCTACATTGGTACCAGCAGAAGCCTGACCAGAGCCCGA |
| | AACTGCTCATCAAATATGCCTCCCAGTCGTTTTCTGGCGTGCCCTCTCGCTTTTCCGGAAGCGGATCTGG |
| | CACAGACTTCACCTTGACCATCAATAGCCTGGAAACTGAGGACGCCGCTACGTATTTCTGCCAGCAGTCC |
| | TCCAGTCTGCCTTGGACATTTGGTCAGGGAACGAAGGTGGAGATCAAGGGTTCAACATCAGGGAGCGGGA |
| | AACCGGGCTCTGGCGAGGGCTCAACAAAGGGACAAGTGCAACTGCAAGAATCGGGACCCGGGCTGGTTAA |
| | ACCAAGTGAAACCCTTTCCCTCACTTGTACCGTAAGCGGCGGTAGCGTGTCCTCTGGTAGCTACTATTGG |
| | AGTTGGATTAGGCAGGCGCCAGGGAAAGGCCTCGAATGGATTGGGTATATCTACTACAGCGGCAGTAACT |
| | ACTACAACCCATCATTGAAGTCTAGAGTGACAATTAGTGTCGATACCTCTAAAAATCAATTCTCACTTAA |
| | GCTGCGAGCTGTAACCGCCGCAGACACTGCGGTGTACTATTGTGCCCGTTGGATGACCACTATCAAGGGC |
| | TACTTCGATTATTGGGGACAAGGGACATTAGTTACGGTGTCCTCCGCAACCAcgacgccagcgccgcgac |
| | caccaacaccggcgcccaccatcgcgtcgcagcccctgtccctgcgcccTgaggcgtgcttcatgtacgt |
| | ggcggcggccgcctttgtgcttctgttcttcgtgggctgcggggtgctgctgtcccgtaaacgCagacgt |
| | caacacggtcaactgtggtttccagaaggttttaaggtctccgaagcaagtaagaagaaaagacgtgaac |
| | cactgggagaagatagcgtcggtctgaaaccactcaagaatgccatggtttctaaactgagccagctgca |
| | gacggagctcctggcggccctgctggagtcagggctgagcaaagaggcactgctccaggcactgggCgag |
| | ccggggccctacctcctggctggagaaggccccctggacaagggggagtcctgcggcggcggtcgagggg |
| | agctggctgagctgcccaatgggctgggggagactcggggctccgaggacgagacCgacgacgatgggga |
| | agacttcacgccacccatcctcaaagagctggagaacctcagccctgaggaggcggcccaccagaaagcc |
| | gtggtggagacccttctgcaggaggacccgtggcgtgtggcgaagatggtcaagtcctacctgcagcagc |
| | acaacatcccacagcgggaggtggtcgataccactggcctcaaccagtcccacctgtcccaacacctcaa |
| | caagggcactcccatgaagacgcagaagcgggccgccctgtacacctggtaTgtccgcaagcagcgagag |
| | gtggcgcagcagttcacccatgcagggcagggagggctgattgaAgaGcccacaggAgatgagctaccaa |
| | ccaagaaggggcggaggaaccgtttcaagtggggcccagcatcccagcagatcctgttccaggcctatga |
| | gaggcagaagaaccctagcaaggaggagcgagaAacgctagtggaggagtgcaatagggcggaatgcatc |
| | cagagaggTgtgtcAccatcacaAgcacaAggTctgggctccaacctcgtcacggaggtgcgtgtctaca |
| | actggtttgccaaccggcgcaaagaagaagccttccggcacaagctggccatgacctgcagggatgagtt |
| | tcccaccatggtgtttccttctgggcagatcagccaggcctcggccttggccccggcccctccccaagtc |
| | ctgccccaggctccagcccctgcccctgctccagccatggtatcagctctggcccaggccccagcccctg |
| | tcccagtcctagccccaggccctcctcaAgctgtggccccacctgcccccaagcccacccaAgctgggga |
| | aggaacgctgtcagaggccctgctgcagctgcagtttgatgatgaagacctgggggccttgcttggcaac |
| | agcacagacccagctgtgttcacagacctggcatccgtcgacaactccgagtttcagcagctgctgaacc |
| | agggcatacctgtggccccccacacaactgagcccatgctgatggagtaccctgaggctataactcgcct |
| | agtgacaggggcccagaggccccccgacccagctcctgctccactgggggccccggggctccccaatggc |
| | ctcctttcaggagatgaagacttctcctccattgcggacatggacttctcagccctgctgagtcagatca |
| | gctcc |
| WPRE | aatcaacctctggattacaaaatttgtgaaagattgactggtattcttaactatgttgctccttttacgc |
| element | tatgtggatacgctgctttaatgcctttgtatcatgctattgcttcccgtatggctttcattttctcctc |
| SEQ ID | cttgtataaatcctggttgctgtctctttatgaggagttgtggcccgttgtcaggcaacgtggcgtggtC |
| NO: 1243 | tgcactgtgtttgctgacgcaacccccactggttggggcattgccaccacctgtcagctcctttccggga |
| | ctttcgctttccccctccctattgccacggcggaactcatcgccgcctgccttgcccgctgctggacagg |
| | ggctcggctgttgggcactgacaattccgtggtgttgtcggggaaatcatcgtcctttccttggctgctc |
| | gcctgtgttgccacctggattctgcgcgggacgtccttctgctacgtcccttcggccctcaatccagcgg |
| | accttccttcccgcggcctgctgccggctctgcggcctcttccgcgtcttcgccttcgccctcagacgag |
| | tcggatctccctttgggccgcctccccgcctg |

[0656] Table 19 provides a summary of the elements in each exemplary logic gate and their nucleotide position as compared to the Logic Gate sequences provided in SEQ ID NOs: 1120, 1121, 1122, 1123, and 1124. In some embodiments, the system comprises one or more element provided in Table 19.

[0657] In some embodiments, the logic gate DNA insert does not comprise the first 480 nucleotides or the last 473 nucleotides of SEQ ID NOs: 1120, 1121, 1122, 1123, or 1124. For example, in some embodiments, the logic gate DNA insert comprises the sequence as set forth in SEQ ID NOs: 1238, 1239, 1240, 1241, or 1242. In some embodiments, the system is encoded by a nucleic acid comprising a sequence with at least 80%, 85%, 90%, 91%, 92%, 93%, 94%, 95%, 96%, 97%, 98%, 99%, or 100% identity to a sequence comprising nucleotides 481-7257 of SEQ ID NO: 1120; a sequence with at least 80%, 85%, 90%, 91%, 92%, 93%, 94%, 95%, 96%, 97%, 98%, 99%, or 100% identity to a sequence comprising nucleotides 481-7239 of SEQ ID NO: 1121; a sequence with at least 80%, 85%, 90%, 91%, 92%, 93%, 94%, 95%, 96%, 97%, 98%, 99%, or 100% identity to a sequence comprising nucleotides 481-7621 of SEQ ID NO: 1122; a sequence with at least 80%, 85%, 90%, 91%, 92%, 93%, 94%, 95%, 96%, 97%, 98%, 99%, or 100% identity to a sequence comprising nucleotides 481-7636 of SEQ ID NO: 1123; or a sequence with at least 80%, 85%, 90%, 91%, 92%, 93%, 94%, 95%, 96%, 97%, 98%, 99%, 100% identity to a sequence comprising nucleotides 481-7621 of SEQ ID NO: 1124; a sequence with at least 80%, 85%, 90%, 91%, 92%, 93%, 94%, 95%, 96%, 97%, 98%, 99%, or 100% identity to a sequence comprising nucleotides 24-7707 of SEQ ID NO: 1120; a sequence with at least 80%, 85%, 90%, 91%, 92%, 93%, 94%, 95%, 96%, 97%, 98%, 99%, or 100% identity to a sequence comprising nucleotides 24-7689 of SEQ ID NO: 1121; a sequence with at least 80%, 85%, 90%, 91%, 92%, 93%, 94%, 95%, 96%, 97%, 98%, 99%, or 100% identity to a sequence comprising nucleotides 24-8071 of SEQ ID NO: 1122; a sequence with at least 80%, 85%, 90%, 91%, 92%, 93%, 94%, 95%, 96%, 97%, 98%, 99%, or 100% identity to a sequence comprising nucleotides 24-8086 of SEQ ID NO: 1123; or a sequence with at least 80%, 85%, 90%, 91%, 92%, 93%, 94%, 95%, 96%, 97%, 98%, 99%, or 100% identity to a sequence comprising nucleotides 24-8071 of SEQ ID NO: 1124.

TABLE 19
Nucleotide positions of elements in Exemplary Logic Gate Systems with Homology Regions

| | Logic Gate | Logic Gate | Logic Gate | Logic Gate | Logic Gate |
|---|---|---|---|---|---|
| | 39 SEQ ID | 43 SEQ ID | 47 SEQ ID | 219 SEQ ID | 239 SEQ ID |
| Element | NO: 1122 | NO: 1123 | NO: 1124 | NO: 1120 | NO: 1121 |
| sgRNA_94 SEQ ID NO: 932 | 1-20 | 1-20 | 1-20 | 1-20 | 1-20 |
| PAM sequence GGG | 21-23 | 21-23 | 21-23 | 21-23 | 21-23 |
| GS94 5′ homology SEQ ID NO: 1235 | 24-473 | 24-473 | 24-473 | 24-473 | 24-473 |
| BGH polyA SEQ ID NO: 995 | 481-708 | 481-708 | 481-708 | 481-708 | 481-708 |
| 6X HNF1α response elements SEQ | 736-845 | 736-845 | 736-845 | 736-845 | 736-845 |
| ID NO: 1245 | | | | | |
| YB-TATA promoter SEQ ID NO: 1246 | 851-875 | 851-875 | 851-875 | 851-875 | 851-875 |
| CD8a signal peptide (amino acid | 923-985 | 923-985 | 923-985 | 923-985 | 923-985 |
| SEQ ID NO: 825) | | | | | |
| CAR scFv | 986-1714 | 986-1729 | 986-1714 | 986-1729 | 986-1714 |
| AAA linker (amino acids AAA) | 1715-1723 | 1730-1738 | 1715-1723 | 1730-1738 | 1715-1723 |
| CD8a hinge (amino acid SEQ ID NO: 821) | 1724-1858 | 1739-1873 | 1724-1858 | 1739-1873 | 1724-1858 |
| CD8a TM (amino acid SEQ ID NO: 822 | 1859-1930 | 1874-1845 | 1859-1930 | 1874-1945 | 1859-1930 |
| 4-1BB (amino acid SEQ ID NO: 823) | 1931-2056 | 1946-2071 | 1931-2056 | 1946-2071 | 1931-2056 |
| CD3zeta (amino acid SEQ ID NO: 824) | 2057-2392 | 2072-2407 | 2057-2392 | 2072-2407 | 2057-2392 |
| WPRE SEQ ID NO: 1243 | 2396-2987 | 2411-3002 | 2396-2987 | 2411-3002 | 2396-2987 |
| SV40 polyA SEQ ID NO: 1244 | 3006-3137 | 3021-3152 | 3006-3137 | 3021-3152 | 3006-3137 |
| EF1a promoter SEQ ID NO: 991 | 3212-3585 | 3227-3600 | 3212-3585 | 3227-3600 | 3212-3585 |
| FAS/PTPN/TGFBR2 shRNA module | 3586-4604 | 3601-4619 | 3586-4604 | 3601-4619 | 3586-4604 |
| SEQ ID NO: 972 | | | | | |
| FAS/PTPN/TGFBR2 shRNA module | 3586-4580 | 3601-4595 | 3586-4580 | 3601-4595 | 3586-4580 |
| intron sequence (SEQ ID NO: 1252) | | | | | |
| CD8a signal peptide (amino acid | 4625-4687 | 4640-4702 | 4625-4687 | 4640-4702 | 4625-4687 |
| SEQ ID NO: 825) | | | | | |
| Priming receptor scFv | 4688-5425 | 4703-5440 | 4688-5425 | 4703-5443 | 4688-5425 |
| CD8a hinge (amino acid SEQ ID NO: 827) | 5429-5509 | 5444-5524 | 5429-5509 | 5447-5527 | 5429-5509 |
| Notch_TMD (amino acid SEQ ID NO: 828) | 5510-5575 | 5525-5590 | 5510-5575 | 5528-5593 | 5510-5575 |
| Notch1_JMD (amino acid SEQ ID NO: 829) | 5576-5704 | 5591-5719 | 5576-5704 | 5594-5722 | 5576-5704 |
| HNF1α DBD (amino acid SEQ ID NO: 830) | 5705-6553 | 5720-6568 | 5705-6553 | 5723-6571 | 5705-6553 |
| TCR Linker (amino acids TCR) | 6554-6562 | 6569-6577 | 6554-6562 | 6572-6580 | 6554-6562 |
| p65 (amino acid SEQ ID NO: 831) | 6563-7135 | 6578-7150 | 6563-7135 | 6581-7153 | 6563-7135 |
| human GH1 polyA SEQ ID NO: 994 | 7143-7621 | 7158-7636 | 7143-7621 | NA | NA |
| 2X Synthetic polyA SEQ ID NO: 993 | NA | NA | NA | 7161-7257 | 7143-7239 |
| GS94 3′ homology SEQ ID NO: 1236 | 7622-8071 | 7637-8086 | 7622-8071 | 7258-7707 | 7240-7689 |
| PAM sequence CCC | 8072-8074 | 8087-8089 | 8072-8074 | 7708-7710 | 7690-7692 |
| sgRNA 94 reverse complement sequence | 8075-8094 | 8090-8109 | 8075-8094 | 7711-7730 | 7693-7712 |
| SEQ ID NO: 1237 | | | | | |

### Suppressors of Gene Expression

[0658] In various embodiments, a logic gate system provided herein comprises one or more suppressors of gene expression. A suppressor of gene expression can be used, for example, to suppress activity of genes that have inhibitory effects on T cell properties, such as expansion or target cell killing. Suppressors of gene expression can function via any mechanism known in the art. Suppressors of gene expression can function, for example, by knock-out of the genomic sequence, suppression of gene transcription, or suppression of protein translation (“knock-down”). Examples of suppressors of gene expression include, but are not limited to, sgRNAs, shRNAs, RNAi molecules, TALENs, and zinc-finger nucleases (ZFNs).

[0659] In one aspect, provided herein are one or more nucleic acids, wherein the one or more nucleic acids encode: a first chimeric polypeptide that comprises a priming receptor comprising a first extracellular antigen-binding domain that specifically binds human Solute Carrier Family 34 Member 2 (SLC34A2); a second chimeric polypeptide that comprises a chimeric antigen receptor (CAR) comprising a second extracellular antigen-binding domain that specifically binds to human Transmembrane protease, serine 4 (TMPRSS4) and at least one or more nucleic acids comprising a nucleic acid that is complementary to a portion of a nucleic acid encoding human Fas Cell Surface Death Receptor (FAS) comprising the sequence set forth in SEQ ID NO: 964; and/or a nucleic that is complementary to a portion of the nucleic acid encoding human Transforming Growth factor (TGF)-β Receptor 2 (TGFBR2) comprising the sequence set forth in SEQ ID NO: 965. In some embodiments, the nucleic acid sequence is at least 15 nucleotides in length and is complementary to nucleotides 1126 to 1364 of the nucleic acid encoding human FAS set forth in SEQ ID NO: 964. In some embodiments, the nucleic acid sequence is complementary to nucleotides 1126 to 1147 of a nucleic acid encoding human FAS set forth in SEQ ID NO: 964. In some embodiments, the nucleic acid comprises a nucleic acid sequence at least 15 nucleotides in length complementary to a portion thereof of the nucleotide sequence encoding Phosphatase Non-Receptor Type 2 (PTPN2) set forth in SEQ ID NO: 966. In some embodiments, the nucleic acid sequence is complementary to nucleotides 518-559 of the nucleic acid encoding human PTPN2 set forth in SEQ ID NO: 966. In some embodiments, the nucleic acid sequence is complementary to nucleotides 518-539 of the nucleic acid encoding human PTPN2 set forth in SEQ ID NO: 966.

### RNA Interference Molecules

[0660] Transforming Growth Factor Beta Receptor 1 (TGF-βR1 or TGFBR1; HGNC: 11772, NCBI Entrez Gene: 7046, UniProtKB/Swiss-Prot: P36897) is a transmembrane serine/threonine protein kinase and forms a heteromeric complex with TGF-beta receptor type II (TGFRB2) when bound to TGF-beta, transducing the TGF-beta signal from the cell surface to the cytoplasm.

[0661] Transforming Growth Factor Beta Receptor 2 (TGF-βR2 or TGFBR2; HGNC: 11773, NCBI Entrez Gene: 7048, UniProtKB/Swiss-Prot: P37173) is a transmembrane serine/threonine protein kinase and forms a heterodimeric complex with TGF-beta receptor type-1 (TGFBR1) when bound to TGF-beta, resulting in transduction of the TGF-beta signal from the cell surface to the cytoplasm.

[0662] Fas Cell Surface Death Receptor (or Fas Receptor, FAS, CD95, or TNFRSF6; HGNC: 11920, NCBI Entrez Gene: 355; UniProtKB/Swiss-Prot: P25445) is an apoptosis-inducing TNF receptor superfamily member.

[0663] Protein Tyrosine Phosphatase Non-Receptor Type 2 (PTPN2; HGNC: 9650, NCBI Entrez Gene: 5771; UniProtKB/Swiss-Prot: P17706) is a phosphatase that regulates interferon and many other signaling pathways.

[0664] Sequences of FAS, PTPN2, and TGFBR2 nucleic acids, and nucleic acids that target such sequences are provided in Table 20 below. In some embodiments, the logic gate comprises at least one sequence as set forth in SEQ ID NOs: 967-990.

TABLE 20
Gene Expression Suppressors and Targets

| SEQ | | |
|---|---|---|
| ID | | |
| NO | Name | Sequence |
| 964 | FAS mRNA | CTCTTCTCCCGCGGGTTGGTGGACCCGCTCAGTACGGAGTTGGGGAAGCTCTTTCACTTC |
| | NCBI | GGAGGATTGCTCAACAACCATGCTGGGCATCTGGACCCTCCTACCTCTGGTTCTTACGTC |
| | NM_000043.6 | TGTTGCTAGATTATCGTCCAAAAGTGTTAATGCCCAAGTGACTGACATCAACTCCAAGGG |
| | | ATTGGAATTGAGGAAGACTGTTACTACAGTTGAGACTCAGAACTTGGAAGGCCTGCATCA |
| | | TGATGGCCAATTCTGCCATAAGCCCTGTCCTCCAGGTGAAAGGAAAGCTAGGGACTGCAC |
| | | AGTCAATGGGGATGAACCAGACTGCGTGCCCTGCCAAGAAGGGAAGGAGTACACAGACAA |
| | | AGCCCATTTTTCTTCCAAATGCAGAAGATGTAGATTGTGTGATGAAGGACATGGCTTAGA |
| | | AGTGGAAATAAACTGCACCCGGACCCAGAATACCAAGTGCAGATGTAAACCAAACTTTTT |
| | | TTGTAACTCTACTGTATGTGAACACTGTGACCCTTGCACCAAATGTGAACATGGAATCAT |
| | | CAAGGAATGCACACTCACCAGCAACACCAAGTGCAAAGAGGAAGGATCCAGATCTAACTT |
| | | GGGGTGGCTTTGTCTTCTTCTTTTGCCAATTCCACTAATTGTTTGGGTGAAGAGAAAGGA |
| | | AGTACAGAAAACATGCAGAAAGCACAGAAAGGAAAACCAAGGTTCTCATGAATCTCCAAC |
| | | TTTAAATCCTGAAACAGTGGCAATAAATTTATCTGATGTTGACTTGAGTAAATATATCAC |
| | | CACTATTGCTGGAGTCATGACACTAAGTCAAGTTAAAGGCTTTGTTCGAAAGAATGGTGT |
| | | CAATGAAGCCAAAATAGATGAGATCAAGAATGACAATGTCCAAGACACAGCAGAACAGAA |
| | | AGTTCAACTGCTTCGTAATTGGCATCAACTTCATGGAAAGAAAGAAGCGTATGACACATT |
| | | GATTAAAGATCTCAAAAAAGCCAATCTTTGTACTCTTGCAGAGAAAATTCAGACTATCAT |
| | | CCTCAAGGACATTACTAGTGACTCAGAAAATTCAAACTTCAGAAATGAAATCCAAAGCTT |
| | | GGTCTAGAGTGAAAAACAACAAATTCAGTTCTGAGTATATGCAATTAGTGTTTGAAAAGA |
| | | TTCTTAATAGCTGGCTGTAAATACTGCTTGGTTTTTTACTGGGTACATTTTATCATTTAT |
| | | TAGCGCTGAAGAGCCAACATATTTGTAGATTTTTAATATCTCATGATTCTGCCTCCAAGG |
| | | ATGTTTAAAATCTAGTTGGGAAAACAAACTTCATCAAGAGTAAATGCAGTGGCATGCTAA |
| | | GTACCCAAATAGGAGTGTATGCAGAGGATGAAAGATTAAGATTATGCTCTGGCATCTAAC |
| | | ATATGATTCTGTAGTATGAATGTAATCAGTGTATGTTAGTACAAATGTCTATCCACAGGC |
| | | TAACCCCACTCTATGAATCAATAGAAGAAGCTATGACCTTTTGCTGAAATATCAGTTACT |
| | | GAACAGGCAGGCCACTTTGCCTCTAAATTACCTCTGATAATTCTAGAGATTTTACCATAT |
| | | TTCTAAACTTTGTTTATAACTCTGAGAAGATCATATTTATGTAAAGTATATGTATTTGAG |
| | | TGCAGAATTTAAATAAGGCTCTACCTCAAAGACCTTTGCACAGTTTATTGGTGTCATATT |
| | | ATACAATATTTCAATTGTGAATTCACATAGAAAACATTAAATTATAATGTTTGACTATTA |
| | | TATATGTGTATGCATTTTACTGGCTCAAAACTACCTACTTCTTTCTCAGGCATCAAAAGC |
| | | ATTTTGAGCAGGAGAGTATTACTAGAGCTTTGCCACCTCTCCATTTTTGCCTTGGTGCTC |
| | | ATCTTAATGGCCTAATGCACCCCCAAACATGGAAATATCACCAAAAAATACTTAATAGTC |
| | | CACCAAAAGGCAAGACTGCCCTTAGAAATTCTAGCCTGGTTTGGAGATACTAACTGCTCT |
| | | CAGAGAAAGTAGCTTTGTGACATGTCATGAACCCATGTTTGCAATCAAAGATGATAAAAT |
| | | AGATTCTTATTTTTCCCCCACCCCCGAAAATGTTCAATAATGTCCCATGTAAAACCTGCT |
| | | ACAAATGGCAGCTTATACATAGCAATGGTAAAATCATCATCTGGATTTAGGAATTGCTCT |
| | | TGTCATACCCCCAAGTTTCTAAGATTTAAGATTCTCCTTACTACTATCCTACGTTTAAAT |
| | | ATCTTTGAAAGTTTGTATTAAATGTGAATTTTAAGAAATAATATTTATATTTCTGTAAAT |
| | | GTAAACTGTGAAGATAGTTATAAACTGAAGCAGATACCTGGAACCACCTAAAGAACTTCC |
| | | ATTTATGGAGGATTTTTTTGCCCCTTGTGTTTGGAATTATAAAATATAGGTAAAAGTACG |
| | | TAATTAAATAATGTTTTTGGTATTTCTGGTTTTCTCTTTTTTGGTAGGGGCTTGCTTTTT |
| | | GGTTTTGTCTTCCTTTTCTCTAACTGATGCTAAATATAACTTGTCTTTAATGCTTCTTGG |
| | | ATCCCTTAGAAGGTACTTCCTTTTTAACCTTAACCCTTTTAGTAGTTAAATAATTATTTC |
| | | CATAGGTTGCTATTGCCAAGAAGACCTCTTCCAAACAGCACATGATTATTCGTCAAACAG |
| | | TTTCGTATTCCAGATACTGGAATGTGGATAAGAAAGTATACATTTCAAGGGGTAGGTTTT |
| | | ATTATTAAGAAAGCCAAATGAGGATTTTGAAATATTCTTTCCTGCATATTATCCATTCTA |
| | | GCTACATGCTGGCCAGTGGGCCACCTTTCTTTTCTGCAATTTAATGCTAGTAATATATTC |
| | | TATTTAACCCATGAGTCCCAAAGTATTAGCATTTCAACATGTAAGCATGTCGGTAAGATA |
| | | GTTGTGCTTTGCTTAGGGTTCCCTCCTGTGTTATGGTCTGGAAAGTGTCTTTAGGCAGAA |
| | | AGTCTGAGTGATCACAGGGTTCACTCATTAATTTCTCTTTTCTGAGCCATCATAGTCTGT |
| | | GCTGTCTGCTCTCCAGTTTTCTATTTCTAGACAGAAGTAGGGCAAGTTAGGTACTAGTTA |
| | | TTCTTCATGGCCAGAAGTGCAAGTTCTACTTTGCAAGACAAGATTAAGTTAGAGAACACC |
| | | CTATTCCACTTTGGTGAACTCAGAGCAAGAACTTTGAGTTCCTTTGGGAGGAAGACAGTG |
| | | GAGAAGTCTTTGTACTTGGTGATGTGGTTTTTTTCCTCATGGCTTCACCTAGTGGCCCCA |
| | | AGCATGACTTCTCCCATGTCAATGAGCACAGCCACATTCCCGAGTTGAGGTGACCCCACG |
| | | GTCCAGAATCATCCTCATTCTGGTGAACCTGGTTCTCTTTGTGGTGGGCATACTGGGTAG |
| | | GAGAATCACCCAAAGGTCACCCATGAGCTGCAGAAAAAAAGGCTATTTGCAGAAGGAGCT |
| | | CACAGATCACATTGAAAGCATTGCATATTCAAACATCTTGGTCTTCTTTATTGGCATGCC |
| | | CACAGGGTCTTCTGACCTCTGATTAGATCAGACACTTTTTAGATATTGAATCATCAGTTT |
| | | CTGTACAACTATCTGAATAAGGTATATAATCAATGAAATTTAGAATTTTTTTCTATGCTT |
| | | ACTCCTGATTGGTAATTTGTTTGGGTTTAGAATTCTATACAAGGCCATTTGTAATTTTCC |
| | | TCAGCACTTTAAAAATATTAAACCATGTTTTCTTAA |
| 965 | TGF-β | ACTCGCGCGCACGGAGCGACGACACCCCCGCGCGTGCACCCGCTCGGGACAGGAGCCGGA |
| | Receptor 2 | CTCCTGTGCAGCTTCCCTCGGCCGCCGGGGGCCTCCCCGCGCCTCGCCGGCCTCCAGGCC |
| | (TGFBR2) | CCCTCCTGGCTGGCGAGCGGGCGCCACATCTGGCCCGCACATCTGCGCTGCCGGCCCGGC |
| | cDNA | GCGGGGTCCGGAGAGGGCGCGGCGCGGAGGCGCAGCCAGGGGTCCGGGAAGGCGCCGTCC |
| | | GCTGCGCTGGGGGCTCGGTCTATGACGAGCAGCGGGGTCTGCCATGGGTCGGGGGCTGCT |
| | | CAGGGGCCTGTGGCCGCTGCACATCGTCCTGTGGACGCGTATCGCCAGCACGATCCCACC |
| | | GCACGTTCAGAAGTCGGTTAATAACGACATGATAGTCACTGACAACAACGGTGCAGTCAA |
| | | GTTTCCACAACTGTGTAAATTTTGTGATGTGAGATTTTCCACCTGTGACAACCAGAAATC |
| | | CTGCATGAGCAACTGCAGCATCACCTCCATCTGTGAGAAGCCACAGGAAGTCTGTGTGGC |
| | | TGTATGGAGAAAGAATGACGAGAACATAACACTAGAGACAGTTTGCCATGACCCCAAGCT |
| | | CCCCTACCATGACTTTATTCTGGAAGATGCTGCTTCTCCAAAGTGCATTATGAAGGaaaa |
| | | aaaaaaGCCTGGTGAGACTTTCTTCATGTGTTCCTGTAGCTCTGATGAGTGCAATGACAA |
| | | CATCATCTTCTCAGAAGAATATAACACCAGCAATCCTGACTTGTTGCTAGTCATATTTCA |
| | | AGTGACAGGCATCAGCCTCCTGCCACCACTGGGAGTTGCCATATCTGTCATCATCATCTT |
| | | CTACTGCTACCGCGTTAACCGGCAGCAGAAGCTGAGTTCAACCTGGGAAACCGGCAAGAC |
| | | GCGGAAGCTCATGGAGTTCAGCGAGCACTGTGCCATCATCCTGGAAGATGACCGCTCTGA |
| | | CATCAGCTCCACGTGTGCCAACAACATCAACCACAACACAGAGCTGCTGCCCATTGAGCT |
| | | GGACACCCTGGTGGGGAAAGGTCGCTTTGCTGAGGTCTATAAGGCCAAGCTGAAGCAGAA |
| | | CACTTCAGAGCAGTTTGAGACAGTGGCAGTCAAGATCTTTCCCTATGAGGAGTATGCCTC |
| | | TTGGAAGACAGAGAAGGACATCTTCTCAGACATCAATCTGAAGCATGAGAACATACTCCA |
| | | GTTCCTGACGGCTGAGGAGCGGAAGACGGAGTTGGGGAAACAATACTGGCTGATCACCGC |
| | | CTTCCACGCCAAGGGCAACCTACAGGAGTACCTGACGCGGCATGTCATCAGCTGGGAGGA |
| | | CCTGCGCAAGCTGGGCAGCTCCCTCGCCCGGGGGATTGCTCACCTCCACAGTGATCACAC |
| | | TCCATGTGGGAGGCCCAAGATGCCCATCGTGCACAGGGACCTCAAGAGCTCCAATATCCT |
| | | CGTGAAGAACGACCTAACCTGCTGCCTGTGTGACTTTGGGCTTTCCCTGCGTCTGGACCC |
| | | TACTCTGTCTGTGGATGACCTGGCTAACAGTGGGCAGGTGGGAACTGCAAGATACATGGC |
| | | TCCAGAAGTCCTAGAATCCAGGATGAATTTGGAGAATGTTGAGTCCTTCAAGCAGACCGA |
| | | TGTCTACTCCATGGCTCTGGTGCTCTGGGAAATGACATCTCGCTGTAATGCAGTGGGAGA |
| | | AGTAAAAGATTATGAGCCTCCATTTGGTTCCAAGGTGCGGGAGCACCCCTGTGTCGAAAG |
| | | CATGAAGGACAACGTGTTGAGAGATCGAGGGCGACCAGAAATTCCCAGCTTCTGGCTCAA |
| | | CCACCAGGGCATCCAGATGGTGTGTGAGACGTTGACTGAGTGCTGGGACCACGACCCAGA |
| | | GGCCCGTCTCACAGCCCAGTGTGTGGCAGAACGCTTCAGTGAGCTGGAGCATCTGGACAG |
| | | GCTCTCGGGGAGGAGCTGCTCGGAGGAGAAGATTCCTGAAGACGGCTCCCTAAACACTAC |
| | | CAAATAGCTCTTCTGGGGCAGGCTGGGCCATGTCCAAAGAGGCTGCCCCTCTCACCAAAG |
| | | AACAGAGGCAGCAGGAAGCTGCCCCTGAACTGATGCTTCCTGGAAAACCAAGGGGGTCAC |
| | | TCCCCTCCCTGTAAGCTGTGGGGATAAGCAGAAACAACAGCAGCAGGGAGTGGGTGACAT |
| | | AGAGCATTCTATGCCTTTGACATTGTCATAGGATAAGCTGTGTTAGCACTTCCTCAGGAA |
| | | ATGAGATTGATTTTTACAATAGCCAATAACATTTGCACTTTATTAATGCCTGtatataaa |
| | | tatgaatagctatgttttatatatatatatatatatctatatatgtctatagctctatat |
| | | atataGCCATACCTTGAAAAGAGACAAGGAAAAACATCAAATATTCCCAGGAAATTGGTT |
| | | TTATTGGAGAACTCCAGAACCAAGCAGAGAAGGAAGGGACCCATGACAGCATTAGCATTT |
| | | GACAATCACACATGCAGTGGTTCTCTGACTGTAAAACAGTGAACTTTGCATGAGGAAAGA |
| | | GGCTCCATGTCTCACAGCCAGCTATGACCACATTGCACTTGCTTTTGCAAAATAATCATT |
| | | CCCTGCCTAGCACTTCTCTTCTGGCCATGGAACTAAGTACAGTGGCACTGTTTGAGGACC |
| | | AGTGTTCCCGGGGTTCCTGTGTGCCCTTATTTCTCCTGGACTTTTCATTTAAGCTCCAAG |
| | | CCCCAAATCTGGGGGGCTAGTTTAGAAACTCTCCCTCAACCTAGTTTAGAAACTCTACCC |
| | | CATCTTTAATACCTTGAATGTTTTGAACCCCACTTTTTACCTTCATGGGTTGCAGAAAAA |
| | | TCAGAACAGATGTCCCCATCCATGCGATTGCCCCACCATCTACTAATGAAAAATTGTTCT |
| | | TTTTTTCATCTTTCCCCTGCACTTATGTTACTATTCTCTGCTCCCAGCCTTCATCCTTTT |
| | | CTAAAAAGGAGCAAATTCTCACTCTAGGCTTTATCGTGTTTACTTTTTCATTACACTTGA |
| | | CTTGATTTTCTAGTTTTCTATACAAACACCAATGGGTTCCATCTTTCTGGGCTCCTGATT |
| | | GCTCAAGCACAGTTTGGCCTGATGAAGAGGATTTCAACTACACAATACTATCATTGTCAG |
| | | GACTATGACCTCAGGCACTCTAAACATAtgttttgtttggtcagcacagcgtttcaaaaa |
| | | gtgaagccactttataaatatttggagattttgcaggaaaatctggatccccagGTAAGG |
| | | ATAGCAGATGGTTTTCAGTTATCTCCAGTCCACGTTCACAAAATGTGAAGGTGTGGAGAC |
| | | ACTTACAAAGCTGCCTCACTTCTCACTGTAAACATTAGCTCTTTCCACTGCCTACCTGGA |
| | | CCCCAGTCTAGGAATTAAATCTGCACCTAACCAAGGTCCCTTGTAAGAAATGTCCATTCA |
| | | AGCAGTCATTCTCTGGGTATATAATATGATTTTGACTACCTTATCTGGTGTTAAGATTTG |
| | | AAGTTGGCCTTTTATTGGACTAAAGGGGAACTCCTTTAAGGGTCTCAGTTAGCCCAAGTT |
| | | TCTTTTGCTTATATGTTAATAGTTTTACCCTCTGCATTGGAGAGAGGAGTGCTTTACTCC |
| | | AAGAAGCTTTCCTCATGGTTACCGTTCTCTCCATCATGCCAGCCTTCTCAACCTTTGCAG |
| | | AAATTACTAGAGAGGATTTGAATGTGGGACACAAAGGTCCCATTTGCAGTTAGAAAATTT |
| | | GTGTCCACAAGGACAAGAACAAAGTATGAGCTTTAAAACTCCATAGGAAACTTGTTAATC |
| | | AACAAAGAAGTGTTAATGCTGCAAGTAATCTCTTTTTTAAAACTTTTTGAAGCTACTTAT |
| | | TTTCAGCCAAATAGGAATATTAGAGAGGGACTGGTAGTGAGAATATCAGCTCTGTTTGGA |
| | | TGGTGGAAGGTCTCATTTTATTGAGATTTTTAAGATACATGCAAAGGTTTGGAAATAGAA |
| | | CCTCTAGGCACCCTCCTCAGTGTGGGTGGGCTGAGAGTTAAAGACAGTGTGGCTGCAGTA |
| | | GCATAGAGGCGCCTAGAAATTCCACTTGCACCGTAGGGCATGCTGATACCATCCCAATAG |
| | | CTGTTGCCCATTGACCTCTAGTGGTGAGTTTCTAGAATACTGGTCCATTCATGAGATATT |
| | | CAAGATTCAAGAGTATTCTCACTTCTGGGTTATCAGCATAAACTGGAATGTAGTGTCAGA |
| | | GGATACTGTGGCTTGTTTTGTTTATGtttttttttCTTATTCAAGAAAAAAGACCAAGGA |
| | | ATAACATTCTGTAGTTCCTAAAAATACTGACTTTTTTCACTACTATACATAAAGGGAAAG |
| | | TTTTATTCTTTTATGGAACACTTCAGCTGTACTCATGTATTAAAATAGGAATGTGAATGC |
| | | TATATACTCTTTTTATATCAAAAGTCTCAAGCACTTATTTTTATTCTATGCATTGTTTGT |
| | | CTTTTACATAAATAAAATGTTTATTAGATTGAATAAAGCAAAATACTCAGGTGAGCATCC |
| | | TGCCTCCTGTTCCCATTCCTAGTAGCTAAA |
| 966 | PTPN2 | GCATGCGCCGCAGCGCCAGCGCTCTCCCCGGATCGTGCGGGGCCTGAGCCTCTCCGCCGG |
| | mRNA NCBI | CGCAGGCTCTGCTCGCGCCAGCTCGCTCCCGCAGCCATGCCCACCACCATCGAGCGGGAG |
| | NM_002828.4 | TTCGAAGAGTTGGATACTCAGCGTCGCTGGCAGCCGCTGTACTTGGAAATTCGAAATGAG |
| | | TCCCATGACTATCCTCATAGAGTGGCCAAGTTTCCAGAAAACAGAAATCGAAACAGATAC |
| | | AGAGATGTAAGCCCATATGATCACAGTCGTGTTAAACTGCAAAATGCTGAGAATGATTAT |
| | | ATTAATGCCAGTTTAGTTGACATAGAAGAGGCACAAAGGAGTTACATCTTAACACAGGGT |
| | | CCACTTCCTAACACATGCTGCCATTTCTGGCTTATGGTTTGGCAGCAGAAGACCAAAGCA |
| | | GTTGTCATGCTGAACCGCATTGTGGAGAAAGAATCGGTTAAATGTGCACAGTACTGGCCA |
| | | ACAGATGACCAAGAGATGCTGTTTAAAGAAACAGGATTCAGTGTGAAGCTCTTGTCAGAA |
| | | GATGTGAAGTCGTATTATACAGTACATCTACTACAATTAGAAAATATCAATAGTGGTGAA |
| | | ACCAGAACAATATCTCACTTTCATTATACTACCTGGCCAGATTTTGGAGTCCCTGAATCA |
| | | CCAGCTTCATTTCTCAATTTCTTGTTTAAAGTGAGAGAATCTGGCTCCTTGAACCCTGAC |
| | | CATGGGCCTGCGGTGATCCACTGTAGTGCAGGCATTGGGCGCTCTGGCACCTTCTCTCTG |
| | | GTAGACACTTGTCTTGTTTTGATGGAAAAAGGAGATGATATTAACATAAAACAAGTGTTA |
| | | CTGAACATGAGAAAATACCGAATGGGTCTTATTCAGACCCCAGATCAACTGAGATTCTCA |
| | | TACATGGCTATAATAGAAGGAGCAAAATGTATAAAGGGAGATTCTAGTATACAGAAACGA |
| | | TGGAAAGAACTTTCTAAGGAAGACTTATCTCCTGCCTTTGATCATTCACCAAACAAAATA |
| | | ATGACTGAAAAATACAATGGGAACAGAATAGGTCTAGAAGAAGAAAAACTGACAGGTGAC |
| | | CGATGTACAGGACTTTCCTCTAAAATGCAAGATACAATGGAGGAGAACAGTGAGAGTGCT |
| | | CTACGGAAACGTATTCGAGAGGACAGAAAGGCCACCACAGCTCAGAAGGTGCAGCAGATG |
| | | AAACAGAGGCTAAATGAGAATGAACGAAAAAGAAAAAGGTGGTTATATTGGCAACCTATT |
| | | CTCACTAAGATGGGGTTTATGTCAGTCATTTTGGTTGGCGCTTTTGTTGGCTGGACACTG |
| | | TTTTTTCAGCAAAATGCCCTATAAACAATTAATTTTGCCCAGCAAGCTTCTGCACTAGTA |
| | | ACTGACAGTGCTACATTAATCATAGGGGTTTGTCTGCAGCAAACGCCTCATATCCCAAAA |
| | | ACGGTGCAGTAGAATAGACATCAACCAGATAAGTGATATTTACAGTCACAAGCCCAACAT |
| | | CTCAGGACTCTTGACTGCAGGTTCCTCTGAACCCCAAACTGTAAATGGCTGTCTAAAATA |
| | | AAGACATTCATGTTTGTTAAAAACTGGTAAATTTTGCAACTGTATTCATACATGTCAAAC |
| | | ACAGTATTTCACCTGACCAACATTGAGATATCCTTTATCACAGGATTTGTTTTTGGAGGC |
| | | TATCTGGATTTTAACCTGCACTTGATATAAGCAATAAATATTGTGGTTTTATCTACGTTA |
| | | TTGGAAAGAAAATGACATTTAAATAATGTGTGTAATGTATAATGTACTATTGACATGGGC |
| | | ATCAACACTTTTATTCTTAAGCATTTCAGGGTAAATATATTTTATAAGTATCTATTTAAT |
| | | CTTTTGTAGTTAACTGTACTTTTTAAGAGCTCAATTTGAAAAATCTGTTACTAAAAAAAT |
| | | AAATTGTATGTCGATTGAATTGTACTGGATACATTTTCCATTTTTCTAAAGAGAAGTTTG |
| | | ATATGAGCAGTTAGAAGTTGGAATAAGCAATTTCTACTATATATTGCATTTCTTTTATGT |
| | | TTTACAGTTTTCCCCATTTTAAAAAGAAAAGCAAACAAAGAAACAAAAGTTTTTCCTAAA |
| | | AATATCTTTGAAGGAAAATTCTCCTTACTGGGATAGTCAGGTAAACAGTTGGTCAAGACT |
| | | TTGTAAAGAAATTGGTTTCTGTAAATCCCATTATTGATATGTTTATTTTTCATGAAAATT |
| | | TCAATGTAGTTGGGGTAGATTATGATTTAGGAAGCAAAAGTAAGAAGCAGCATTTTATGA |
| | | TTCATAATTTCAGTTTACTAGACTGAAGTTTTGAAGTAAACACTTTTCAGTTTCTTTCTA |
| | | CTTCAATAAATAGTATGATTATATGCAAACCTTACATTGTCATTTTAACTTAATGAATAT |
| | | TTTTTAAAGCAAACTGTTTAATGAATTTAACTGCTCATTTGAATGCTAGCTTTCCTCAGA |
| | | TTTCAACATTCCATTCAGTGTTTAATTTGTCTTACTTAAACTTGAAATTGTTGTTACAAA |
| | | TTTAATTGCTAGGAGGCATGGATAGCATACATTATTATGGATAGCATACCTTATTTCAGT |
| | | GGTTTTCAAACTATGCTCATTGGATGTCCAGGTGGGTCAAGAGGTTACTTTCAACCACAG |
| | | CATCTCTGCCTTGTCTCTTTATATGCCACATAAGATTTCTGCATAAGGCTTAAGTATTTT |
| | | AAAGGGGGCAGTTATCATTTAAAAACAGTTTGGTCGGGCGCGGTGGCTCATGCCTGTAAT |
| | | CCCAGCACTTTGGGAGGCTGAAGTGGGCAGATCACCTGAGGTCAGGAGTTCAAGACCAGC |
| | | GAGGGCACCTGTAATCTCAGCTACTCAGGAGGCTGAGGTAGGAGAATTGCTTGAACCCAG |
| | | CTGGCCAACGTGGTGAAACACCATCTCTACTAAAAATGCAAAAATTAGCTGGGCATGGTG |
| | | GAGGGCACCTGTAATCTCAGCTACTCAGGAGGCTGAGGTAGGAGAATTGCTTGAACCCAG |
| | | GAGATGGAGGTTGCAGTGAGCTGAGATCACGTCACTGCACTCCAGCCAGGGCGACAGAGC |
| | | GAGACTCCATCTCAAAAGAAACAAACAAAAAAAACAGTTTGGGCCGGGTGTGGTGGCTCA |
| | | CGCTTGTAATCCCAGCACTTCGGAAGGCCAAGGCGGGCGGATCACGAGGTCAAGAGATGG |
| | | AGACTGTCCTGGCCAACATGGTGAAATCCCTTCTTTACTAAAAATACAAAAATTATCTGG |
| | | GCGTGGTGGTGCATGCCTGTAGTCCCAGCTCCTTGGGAGGCTAAGGCAGGAGAATCACTT |
| | | GAACCCGGGAGGCAGAGGTTGCAGTGAGCCGAGATTGCACCACTGCACTCCAGCCTGGCA |
| | | ACAGAGCAAGACTTCGTCTCAAAAAAAAAAAAAAAAAAAGTTTGAAAACCATTGGTATAG |
| | | ATAGATATTTTGAATTGATTTGCATAGTCTCCTTGAATGTGTTAAATTATGTTGAAAGTA |
| | | TGAAAGCAGGATGTAGGTGGTACTACATATTAAATAAGATTTATATAACA |
| 967 | FAS_11 | TTAAGAATCTTTTCAAACACTA |
| 968 | PTPN2_14 | TCTGACAAGAGCTTCACACTGA |
| 969 | TGFBR2_37 | TTATGTAAAAGACAAACAATGC |
| 970 | TGFBR2_23 | TAAAAATCAATCTCATTTCCTG |
| 971 | FAS/TGFBR2/ | gtaagtcgactcgttggatccccactacccggatcaacgccctaggtttatgtttggatg |
| | TGFBR2 | aactgacatacgcgtatccgtcttaagaatcttttcaaacactagtagtgaaatatatat |
| | shRNA | taaactagtgtttgaaaagattcttattacggtaacgcggaattcgcaactattttatca |
| | module | attttttgcgtcgacgacggtgacttaggagtatgccggatcaacgccctaggtttatgt |
| | | ttggatgaactgacatacgcgtatccgtctaaaaatcaatctcatttcctggtagtgaaa |
| | | tatatattaaaccaggaaatgagattgatttttttacggtaacgcggaattcgcaactat |
| | | tttatcaattttttgcgtcgacgactgtgacagcagagtatgccggatcaacgccctagg |
| | | tttatgtttggatgaactgacatacgcgtatccgtcttatgtaaaagacaaacaatgcgt |
| | | agtgaaatatatattaaacgcattgtttgtcttttacatattacggtaacgcggaattcg |
| | | caactattttatcaattttttgcgtcgaccggaactatcttgaagagtagtagtggacta |
| | | gtgtgacgctgctgacccctttctttcccttctacaga |
| 972 | FAS/PTPN2/ | gtaaGTcgactcgttggatccCCACTACCCGGATCAACGCCCTAGGTTTATGTTTGGATG |
| | TGFBR2/ | AACTGACATACGCGTATCCGTCTTAAGAATCTTTTCAAACACTAGTAGTGAAATATATAT |
| | TGFBR2 | TAAACTAGTGTTTGAAAAGATTCTTATTACGGTAACGCGGAATTCGCAACTATTTTATCA |
| | shRNA | ATTTTTTGCGTCGACACTTCAAGGGGCTTGCGGCCGCAACCATCTCCATGGCTGTTTGAA |
| | module | TGAGGCTTCAGTACTTTACAGAATCGTTGCCTGCACATCTTGGAAACACTTGCTGGGATT |
| | | ACTTCGACTTCTTAACCCAACAGAAGGCTCGAGAAGGTATATTGCTGTTGACAGTGAGCG |
| | | CCAGTGTGAAGCTCTTGTCAGATAGTGAAGCCACAGATGTATCTGACAAGAGCTTCACAC |
| | | TGATGCCTACTGCCTCGGACTTCAAGGGGCTAGAATTCGAGCAATTATCTTGTTTACTAA |
| | | AACTGAATACCTTGCTATCTCTTTGATACATTTTTACAAAGCTGAATTAAAATGGTATAA |
| | | ATTAAATCACTTTGACGGTGACTTAGGAGTATGCCGGATCAACGCCCTAGGTTTATGTTT |
| | | GGATGAACTGACATACGCGTATCCGTCTAAAAATCAATCTCATTTCCTGGTAGTGAAATA |
| | | TATATTAAACCAGGAAATGAGATTGATTTTTTTACGGTAACGCGGAATTCGCAACTATTT |
| | | TATCAATTTTTTGCGTCGACGACTGTGACAGCAGAGTATGCCGGATCAACGCCCTAGGTT |
| | | TATGTTTGGATGAACTGACATACGCGTATCCGTCTTATGTAAAAGACAAACAATGCGTAG |
| | | TGAAATATATATTAAACGCATTGTTTGTCTTTTACATATTACGGTAACGCGGAATTCGCA |
| | | ACTATTTTATCAATTTTTTGCGTCGACCGGAACTATCTTGAAGAGTAGTAGTGGactagt |
| | | gtgacgctgctgacccctttctttcccttctACAGATCCAAGCTGTGACCGGCGCCTAC |
| 1252 | FAS/PTPN2/ | gtaaGTcgactcgttggatccCCACTACCCGGATCAACGCCCTAGGTTTATGTTTGGATG |
| | TGFBR2/ | AACTGACATACGCGTATCCGTCTTAAGAATCTTTTCAAACACTAGTAGTGAAATATATAT |
| | TGFBR2 | TAAACTAGTGTTTGAAAAGATTCTTATTACGGTAACGCGGAATTCGCAACTATTTTATCA |
| | shRNA | ATTTTTTGCGTCGACACTTCAAGGGGCTTGCGGCCGCAACCATCTCCATGGCTGTTTGAA |
| | module | TGAGGCTTCAGTACTTTACAGAATCGTTGCCTGCACATCTTGGAAACACTTGCTGGGATT |
| | | ACTTCGACTTCTTAACCCAACAGAAGGCTCGAGAAGGTATATTGCTGTTGACAGTGAGCG |
| | | CCAGTGTGAAGCTCTTGTCAGATAGTGAAGCCACAGATGTATCTGACAAGAGCTTCACAC |
| | | TGATGCCTACTGCCTCGGACTTCAAGGGGCTAGAATTCGAGCAATTATCTTGTTTACTAA |
| | | AACTGAATACCTTGCTATCTCTTTGATACATTTTTACAAAGCTGAATTAAAATGGTATAA |
| | | ATTAAATCACTTTGACGGTGACTTAGGAGTATGCCGGATCAACGCCCTAGGTTTATGTTT |
| | | GGATGAACTGACATACGCGTATCCGTCTAAAAATCAATCTCATTTCCTGGTAGTGAAATA |
| | | TATATTAAACCAGGAAATGAGATTGATTTTTTTACGGTAACGCGGAATTCGCAACTATTT |
| | | TATCAATTTTTTGCGTCGACGACTGTGACAGCAGAGTATGCCGGATCAACGCCCTAGGTT |
| | | TATGTTTGGATGAACTGACATACGCGTATCCGTCTTATGTAAAAGACAAACAATGCGTAG |
| | | TGAAATATATATTAAACGCATTGTTTGTCTTTTACATATTACGGTAACGCGGAATTCGCA |
| | | ACTATTTTATCAATTTTTTGCGTCGACCGGAACTATCTTGAAGAGTAGTAGTGGactagt |
| | | gtgacgctgctgaccccttttttcccttctACAG |
| 973 | FAS miR3G- | GTAAGTCGACTCGTTGGATCCCCACTACCCGGATCAACGCCCTAGGTTTATGTTTGGATG |
| | PTPN2 | AACTGACATACGCGTATCCGTCTTAAGAATCTTTTCAAACACTAGTAGTGAAATATATAT |
| | miRE | TAAACTAGTGTTTGAAAAGATTCTTATTACGGTAACGCGGAATTCGCAACTATTTTATCA |
| | Module | ATTTTTTGCGTCGACACTTCAAGGGGCTTGCGGCCGCAACCATCTCCATGGCTGTTTGAA |
| | | TGAGGCTTCAGTACTTTACAGAATCGTTGCCTGCACATCTTGGAAACACTTGCTGGGATT |
| | | ACTTCGACTTCTTAACCCAACAGAAGGCTCGAGAAGGTATATTGCTGTTGACAGTGAGCG |
| | | CCAGTGTGAAGCTCTTGTCAGATAGTGAAGCCACAGATGTATCTGACAAGAGCTTCACAC |
| | | TGATGCCTACTGCCTCGGACTTCAAGGGGCTAGAATTCGAGCAATTATCTTGTTTACTAA |
| | | AACTGAATACCTTGCTATCTCTTTGATACATTTTTACAAAGCTGAATTAAAATGGTATAA |
| | | ATTAAATCACTTTTTCATCTGACCAGTAGTGGACTAGTGTGACGCTGCTGACCCCTTTCT |
| | | TTCCCTTCTACAG |
| 974 | 2XTGFBR2- | CCGGATCAACGCCCTAGGTTTATGTTTGGATGAACTGACATACGCGTATCCGTCTAAAAA |
| | miR3G | TCAATCTCATTTCCTGGTAGTGAAATATATATTAAACCAGGAAATGAGATTGATTTTTTT |
| | Module | ACGGTAACGCGGAATTCGCAACTATTTTATCAATTTTTTGCGTCGACGACTGTGACAGCA |
| | | GAGTATGCCGGATCAACGCCCTAGGTTTATGTTTGGATGAACTGACATACGCGTATCCGT |
| | | CTTATGTAAAAGACAAACAATGCGTAGTGAAATATATATTAAACGCATTGTTTGTCTTTT |
| | | ACATATTACGGTAACGCGGAATTCGCAACTATTTTATCAATTTTTTGCGTCGAC |
| 975 | FAS-PTPN2- | CCACTACCCGGATCAACGCCCTAGGTTTATGTTTGGATGAACTGACATACGCGTATCCGT |
| | 2XTGFBR2 | CTTAAGAATCTTTTCAAACACTAGTAGTGAAATATATATTAAACTAGTGTTTGAAAAGAT |
| | miR3G | TCTTATTACGGTAACGCGGAATTCGCAACTATTTTATCAATTTTTTGCGTCGACACTTCA |
| | Module | AGGGGCTTGCGGCCGCAACCATCTCCATGGCTGTTTGAATGAGGCTTCAGTACTTTACAG |
| | | AATCGTTGCCTGCACATCTTGGAAACACTTGCTGGGATTACTTCGACTTCTTAACCCAAC |
| | | AGAAGGCTCGAGAAGGTATATTGCTGTTGACAGTGAGCGCCAGTGTGAAGCTCTTGTCAG |
| | | ATAGTGAAGCCACAGATGTATCTGACAAGAGCTTCACACTGATGCCTACTGCCTCGGACT |
| | | TCAAGGGGCTAGAATTCGAGCAATTATCTTGTTTACTAAAACTGAATACCTTGCTATCTC |
| | | TTTGATACATTTTTACAAAGCTGAATTAAAATGGTATAAATTAAATCACTTTGACGGTGA |
| | | CTTAGGAGTATGCCGGATCAACGCCCTAGGTTTATGTTTGGATGAACTGACATACGCGTA |
| | | TCCGTCTAAAAATCAATCTCATTTCCTGGTAGTGAAATATATATTAAACCAGGAAATGAG |
| | | ATTGATTTTTTTACGGTAACGCGGAATTCGCAACTATTTTATCAATTTTTTGCGTCGACG |
| | | ACTGTGACAGCAGAGTATGCCGGATCAACGCCCTAGGTTTATGTTTGGATGAACTGACAT |
| | | ACGCGTATCCGTCTTATGTAAAAGACAAACAATGCGTAGTGAAATATATATTAAACGCAT |
| | | TGTTTGTCTTTTACATATTACGGTAACGCGGAATTCGCAACTATTTTATCAATTTTTTGC |
| | | GTCGAC |
| 976 | FAS- | GGATCTGCGATCGCTCCGGTGCCCGTCAGTGGGCAGAGCGCACATCGCCCACAGTCCCCG |
| | TGFBR2- | AGAAGTTGGGGGGAGGGGTCGGCAATTGAACGGGTGCCTAGAGAAGGTGGCGCGGGGTAA |
| | TGFBR2 | ACTGGGAAAGTGATGTCGTGTACTGGCTCCGCCTTTTTCCCGAGGGTGGGGGAGAACCGT |
| | architecture 1 | ATATAAGTGCAGTAGTCGCCGTGAACGTTCTTTTTCGCAACGGGTTTGCCGCCAGAACAC |
| | (3G-3G-3G) | AGCTGAAGCTTCGAGGGGCTCGCATCTCTCCTTCACGCGCCCGCCGCCCTACCTGAGGCC |
| | triple shRNA | GCCATCCACGCCGGTTGAGTCGCGTTCTGCCGCCTCCCGCCTGTGGTGCCTCCTGAACTG |
| | module, with | CGTCCGCCGTCTAGGTAAGTCGACTCGTTGGATCCCCACTACCCGGATCAACGCCCTAGG |
| | potential | TTTATGTTTGGATGAACTGACATACGCGTATCCGTCTTAAGAATCTTTTCAAACACTAGT |
| | transgene | AGTGAAATATATATTAAACTAGTGTTTGAAAAGATTCTTATTACGGTAACGCGGAATTCG |
| | | CAACTATTTTATCAATTTTTTGCGTCGACGACGGTGACTTAGGAGTATGCCGGATCAACG |
| | | CCCTAGGTTTATGTTTGGATGAACTGACATACGCGTATCCGTCTAAAAATCAATCTCATT |
| | | TCCTGGTAGTGAAATATATATTAAACCAGGAAATGAGATTGATTTTTTTACGGTAACGCG |
| | | GAATTCGCAACTATTTTATCAATTTTTTGCGTCGACGACTGTGACAGCAGAGTATGCCGG |
| | | ATCAACGCCCTAGGTTTATGTTTGGATGAACTGACATACGCGTATCCGTCTTATGTAAAA |
| | | GACAAACAATGCGTAGTGAAATATATATTAAACGCATTGTTTGTCTTTTACATATTACGG |
| | | TAACGCGGAATTCGCAACTATTTTATCAATTTTTTGCGTCGACCGGAACTATCTTGAAGA |
| | | GTAGTAGTGGACTAGTGTGACGCTGCTGACCCCTTTCTTTCCCTTCTACAGATCCAAGCT |
| | | GTGACCGGCGCCTACACCTGCAGCCCAAGCTTACCNNNNNNNNNNNNNNNNNNNNNNNNN |
| | | NNNNNTAAAGGACGGGTGGCATCCCTGTGACCCCTCCCCAGTGCCTCTCCTGGCCCTGGA |
| | | AGTTGCCACTCCAGTGCCCACCAGCCTTGTCCTAATAAAATTAAGTTGCATCATTTTGTC |
| | | TGACTAGGTGTCCTTCTATAATATTATGGGGTGGAGGGGGGTGGTATGGAGCAAGGGGCA |
| | | AGTTGGGAAGACAACCTGTAGGGCCTGCGGGGTCTATTGGGAACCAAGCTGGAGTGCAGT |
| | | GGCACAATCTTGGCTCACTGCAATCTCCGCCTCCTGGGTTCAAGCGATTCTCCTGCCTCA |
| | | GCCTCCCGAGTTGTTGGGATTCCAGGCATGCATGACCAGGCTCAGCTAATTTTTGTTTTT |
| | | TTGGTAGAAACGGGGTTTCACCATATTGGCCAGGCTGGTCTCCAACTCCTAATCTCAGGT |
| | | GATCTACCCACCTTGGCCTCCCAAATTGCTGGGATTACAGGCGTGAACCACTGCTCCCTT |
| | | CCCTGTCCTTC |
| | | (NNNNNNNNNNNNNNNNNNNNNNNNNNNNNN can be absent or can encode |
| | | a transgene of any length) |
| 977 | FAS- | GGATCTGCGATCGCTCCGGTGCCCGTCAGTGGGCAGAGCGCACATCGCCCACAGTCCCCG |
| | TGFBR2- | AGAAGTTGGGGGGAGGGGTCGGCAATTGAACGGGTGCCTAGAGAAGGTGGCGCGGGGTAA |
| | TGFBR2 | ACTGGGAAAGTGATGTCGTGTACTGGCTCCGCCTTTTTCCCGAGGGTGGGGGAGAACCGT |
| | architecture 1 | ATATAAGTGCAGTAGTCGCCGTGAACGTTCTTTTTCGCAACGGGTTTGCCGCCAGAACAC |
| | (3G-3G-3G) | AGCTGAAGCTTCGAGGGGCTCGCATCTCTCCTTCACGCGCCCGCCGCCCTACCTGAGGCC |
| | triple shRNA | GCCATCCACGCCGGTTGAGTCGCGTTCTGCCGCCTCCCGCCTGTGGTGCCTCCTGAACTG |
| | module, 5′ | CGTCCGCCGTCTAGGTAAGTCGACTCGTTGGATCCCCACTACCCGGATCAACGCCCTAGG |
| | end | TTTATGTTTGGATGAACTGACATACGCGTATCCGTCTTAAGAATCTTTTCAAACACTAGT |
| | | AGTGAAATATATATTAAACTAGTGTTTGAAAAGATTCTTATTACGGTAACGCGGAATTCG |
| | | CAACTATTTTATCAATTTTTTGCGTCGACGACGGTGACTTAGGAGTATGCCGGATCAACG |
| | | CCCTAGGTTTATGTTTGGATGAACTGACATACGCGTATCCGTCTAAAAATCAATCTCATT |
| | | TCCTGGTAGTGAAATATATATTAAACCAGGAAATGAGATTGATTTTTTTACGGTAACGCG |
| | | GAATTCGCAACTATTTTATCAATTTTTTGCGTCGACGACTGTGACAGCAGAGTATGCCGG |
| | | ATCAACGCCCTAGGTTTATGTTTGGATGAACTGACATACGCGTATCCGTCTTATGTAAAA |
| | | GACAAACAATGCGTAGTGAAATATATATTAAACGCATTGTTTGTCTTTTACATATTACGG |
| | | TAACGCGGAATTCGCAACTATTTTATCAATTTTTTGCGTCGACCGGAACTATCTTGAAGA |
| | | GTAGTAGTGGACTAGTGTGACGCTGCTGACCCCTTTCTTTCCCTTCTACAGATCCAAGCT |
| | | GTGACCGGCGCCTACACCTGCAGCCCAAGCTTACC |
| 978 | FAS- | TAAAGGACGGGTGGCATCCCTGTGACCCCTCCCCAGTGCCTCTCCTGGCCCTGGAAGTTG |
| | TGFBR2- | CCACTCCAGTGCCCACCAGCCTTGTCCTAATAAAATTAAGTTGCATCATTTTGTCTGACT |
| | TGFBR2 | AGGTGTCCTTCTATAATATTATGGGGTGGAGGGGGGTGGTATGGAGCAAGGGGCAAGTTG |
| | architecture 1 | GGAAGACAACCTGTAGGGCCTGCGGGGTCTATTGGGAACCAAGCTGGAGTGCAGTGGCAC |
| | (3G-3G-3G) | AATCTTGGCTCACTGCAATCTCCGCCTCCTGGGTTCAAGCGATTCTCCTGCCTCAGCCTC |
| | triple shRNA | CCGAGTTGTTGGGATTCCAGGCATGCATGACCAGGCTCAGCTAATTTTTGTTTTTTTGGT |
| | module, 3′ | AGAAACGGGGTTTCACCATATTGGCCAGGCTGGTCTCCAACTCCTAATCTCAGGTGATCT |
| | end | ACCCACCTTGGCCTCCCAAATTGCTGGGATTACAGGCGTGAACCACTGCTCCCTTCCCTG |
| | | TCCTTC |
| 979 | TGFBR2- | GGATCTGCGATCGCTCCGGTGCCCGTCAGTGGGCAGAGCGCACATCGCCCACAGTCCCCG |
| | TGFBR2- | AGAAGTTGGGGGGAGGGGTCGGCAATTGAACGGGTGCCTAGAGAAGGTGGCGCGGGGTAA |
| | FAS | ACTGGGAAAGTGATGTCGTGTACTGGCTCCGCCTTTTTCCCGAGGGTGGGGGAGAACCGT |
| | architecture 2 | ATATAAGTGCAGTAGTCGCCGTGAACGTTCTTTTTCGCAACGGGTTTGCCGCCAGAACAC |
| | triple shRNA | AGCTGAAGCTTCGAGGGGCTCGCATCTCTCCTTCACGCGCCCGCCGCCCTACCTGAGGCC |
| | module, with | GCCATCCACGCCGGTTGAGTCGCGTTCTGCCGCCTCCCGCCTGTGGTGCCTCCTGAACTG |
| | potential | CGTCCGCCGTCTAGGTAAGTCGACTCGTTGGATCCCCACTACCCGGATCAACGCCCTAGG |
| | transgene | TTTATGTTTGGATGAACTGACATACGCGTATCCGTCTAAAAATCAATCTCATTTCCTGGT |
| | insert | AGTGAAATATATATTAAACCAGGAAATGAGATTGATTTTTTTACGGTAACGCGGAATTCG |
| | | CAACTATTTTATCAATTTTTTGCGTCGACACTTCAAGGGGCTTGCGGCCGCAACCATCTC |
| | | CATGGCGACGGTGACTTAGGAGTATGCCGGATCAACGCCCTAGGTTTATGTTTGGATGAA |
| | | CTGACATACGCGTATCCGTCTTATGTAAAAGACAAACAATGCGTAGTGAAATATATATTA |
| | | AACGCATTGTTTGTCTTTTACATATTACGGTAACGCGGAATTCGCAACTATTTTATCAAT |
| | | TTTTTGCGTCGACGACTGTGACAGCAGAGTATGCCGGATCAACGCCCTAGGTTTATGTTT |
| | | GGATGAACTGACATACGCGTATCCGTCTTAAGAATCTTTTCAAACACTAGTAGTGAAATA |
| | | TATATTAAACTAGTGTTTGAAAAGATTCTTATTACGGTAACGCGGAATTCGCAACTATTT |
| | | TATCAATTTTTTGCGTCGACCGGAACTATCTTGAAGAGTAGTAGTGGACTAGTGTGACGC |
| | | TGCTGACCCCTTTCTTTCCCTTCTACAGATCCAAGCTGTGACCGGCGCCTACACCTGCAG |
| | | CCCAAGCTTACCNNNNNNNNNNNNNNNNNNNNNNNNNNNNNNTAAAGGACGGGTGGCATC |
| | | CCTGTGACCCCTCCCCAGTGCCTCTCCTGGCCCTGGAAGTTGCCACTCCAGTGCCCACCA |
| | | GCCTTGTCCTAATAAAATTAAGTTGCATCATTTTGTCTGACTAGGTGTCCTTCTATAATA |
| | | TTATGGGGTGGAGGGGGGTGGTATGGAGCAAGGGGCAAGTTGGGAAGACAACCTGTAGGG |
| | | CCTGCGGGGTCTATTGGGAACCAAGCTGGAGTGCAGTGGCACAATCTTGGCTCACTGCAA |
| | | TCTCCGCCTCCTGGGTTCAAGCGATTCTCCTGCCTCAGCCTCCCGAGTTGTTGGGATTCC |
| | | AGGCATGCATGACCAGGCTCAGCTAATTTTTGTTTTTTTGGTAGAAACGGGGTTTCACCA |
| | | TATTGGCCAGGCTGGTCTCCAACTCCTAATCTCAGGTGATCTACCCACCTTGGCCTCCCA |
| | | AATTGCTGGGATTACAGGCGTGAACCACTGCTCCCTTCCCTGTCCTTC |
| | | (NNNNNNNNNNNNNNNNNNNNNNNNNNNNNN can be absent or can encode |
| | | a transgene of any length) |
| 980 | TGFBR2- | GGATCTGCGATCGCTCCGGTGCCCGTCAGTGGGCAGAGCGCACATCGCCCACAGTCCCCG |
| | TGFBR2- | AGAAGTTGGGGGGAGGGGTCGGCAATTGAACGGGTGCCTAGAGAAGGTGGCGCGGGGTAA |
| | FAS | ACTGGGAAAGTGATGTCGTGTACTGGCTCCGCCTTTTTCCCGAGGGTGGGGGAGAACCGT |
| | architecture 2 | ATATAAGTGCAGTAGTCGCCGTGAACGTTCTTTTTCGCAACGGGTTTGCCGCCAGAACAC |
| | triple shRNA | AGCTGAAGCTTCGAGGGGCTCGCATCTCTCCTTCACGCGCCCGCCGCCCTACCTGAGGCC |
| | module, 5′ | GCCATCCACGCCGGTTGAGTCGCGTTCTGCCGCCTCCCGCCTGTGGTGCCTCCTGAACTG |
| | end | CGTCCGCCGTCTAGGTAAGTCGACTCGTTGGATCCCCACTACCCGGATCAACGCCCTAGG |
| | | TTTATGTTTGGATGAACTGACATACGCGTATCCGTCTAAAAATCAATCTCATTTCCTGGT |
| | | AGTGAAATATATATTAAACCAGGAAATGAGATTGATTTTTTTACGGTAACGCGGAATTCG |
| | | CAACTATTTTATCAATTTTTTGCGTCGACACTTCAAGGGGCTTGCGGCCGCAACCATCTC |
| | | CATGGCGACGGTGACTTAGGAGTATGCCGGATCAACGCCCTAGGTTTATGTTTGGATGAA |
| | | CTGACATACGCGTATCCGTCTTATGTAAAAGACAAACAATGCGTAGTGAAATATATATTA |
| | | AACGCATTGTTTGTCTTTTACATATTACGGTAACGCGGAATTCGCAACTATTTTATCAAT |
| | | TTTTTGCGTCGACGACTGTGACAGCAGAGTATGCCGGATCAACGCCCTAGGTTTATGTTT |
| | | GGATGAACTGACATACGCGTATCCGTCTTAAGAATCTTTTCAAACACTAGTAGTGAAATA |
| | | TATATTAAACTAGTGTTTGAAAAGATTCTTATTACGGTAACGCGGAATTCGCAACTATTT |
| | | TATCAATTTTTTGCGTCGACCGGAACTATCTTGAAGAGTAGTAGTGGACTAGTGTGACGC |
| | | TGCTGACCCCTTTCTTTCCCTTCTACAGATCCAAGCTGTGACCGGCGCCTACACCTGCAG |
| | | CCCAAGCTTACC |
| 981 | TGFBR2- | TAAAGGACGGGTGGCATCCCTGTGACCCCTCCCCAGTGCCTCTCCTGGCCCTGGAAGTTG |
| | TGFBR2- | CCACTCCAGTGCCCACCAGCCTTGTCCTAATAAAATTAAGTTGCATCATTTTGTCTGACT |
| | FAS | AGGTGTCCTTCTATAATATTATGGGGTGGAGGGGGGTGGTATGGAGCAAGGGGCAAGTTG |
| | architecture 2 | GGAAGACAACCTGTAGGGCCTGCGGGGTCTATTGGGAACCAAGCTGGAGTGCAGTGGCAC |
| | triple shRNA | AATCTTGGCTCACTGCAATCTCCGCCTCCTGGGTTCAAGCGATTCTCCTGCCTCAGCCTC |
| | module, 3′ | CCGAGTTGTTGGGATTCCAGGCATGCATGACCAGGCTCAGCTAATTTTTGTTTTTTTGGT |
| | end | AGAAACGGGGTTTCACCATATTGGCCAGGCTGGTCTCCAACTCCTAATCTCAGGTGATCT |
| | | ACCCACCTTGGCCTCCCAAATTGCTGGGATTACAGGCGTGAACCACTGCTCCCTTCCCTG |
| | | TCCTTC |
| 982 | FAS- | GGATCTGCGATCGCTCCGGTGCCCGTCAGTGGGCAGAGCGCACATCGCCCACAGTCCCCG |
| | TGFBR2- | AGAAGTTGGGGGGAGGGGTCGGCAATTGAACGGGTGCCTAGAGAAGGTGGCGCGGGGTAA |
| | TGFBR2 | ACTGGGAAAGTGATGTCGTGTACTGGCTCCGCCTTTTTCCCGAGGGTGGGGGAGAACCGT |
| | architecture 3 | ATATAAGTGCAGTAGTCGCCGTGAACGTTCTTTTTCGCAACGGGTTTGCCGCCAGAACAC |
| | (3G-E-3G) | AGCTGAAGCTTCGAGGGGCTCGCATCTCTCCTTCACGCGCCCGCCGCCCTACCTGAGGCC |
| | triple shRNA | GCCATCCACGCCGGTTGAGTCGCGTTCTGCCGCCTCCCGCCTGTGGTGCCTCCTGAACTG |
| | module, with | CGTCCGCCGTCTAGGTAAGTCGACTCGTTGGATCCCCACTACCCGGATCAACGCCCTAGG |
| | potential | TTTATGTTTGGATGAACTGACATACGCGTATCCGTCTTAAGAATCTTTTCAAACACTAGT |
| | transgene | AGTGAAATATATATTAAACTAGTGTTTGAAAAGATTCTTATTACGGTAACGCGGAATTCG |
| | insert | CAACTATTTTATCAATTTTTTGCGTCGACACTTCAAGGGGCTTGCGGCCGCAACCATCTC |
| | | CATGGCGACGGTGACTTAGGAGTATGTGTTTGAATGAGGCTTCAGTACTTTACAGAATCG |
| | | TTGCCTGCACATCTTGGAAACACTTGCTGGGATTACTTCGACTTCTTAACCCAACAGAAG |
| | | GCTCGAGAAGGTATATTGCTGTTGACAGTGAGCGCAGGAAATGAGATTGATTTTTTTAGT |
| | | GAAGCCACAGATGTATAAAAATCAATCTCATTTCCTGTGCCTACTGCCTCGGACTTCAAG |
| | | GGGCTAGAATTCGAGCAATTATCTTGTTTACTAAAACTGAATACCTTGCTATCTCTTTGA |
| | | TACATTTTTACAAAGCTGAATTAAAATGGTATAAATTAAATCACTTTGACTGTGACAGCA |
| | | GAGTATGCCGGATCAACGCCCTAGGTTTATGTTTGGATGAACTGACATACGCGTATCCGT |
| | | CTTATGTAAAAGACAAACAATGCGTAGTGAAATATATATTAAACGCATTGTTTGTCTTTT |
| | | ACATATTACGGTAACGCGGAATTCGCAACTATTTTATCAATTTTTTGCGTCGACCGGAAC |
| | | TATCTTGAAGAGTAGTAGTGGACTAGTGTGACGCTGCTGACCCCTTTCTTTCCCTTCTAC |
| | | AGATCCAAGCTGTGACCGGCGCCTACACCTGCAGCCCAAGCTTACCNNNNNNNNNNNNNN |
| | | NNNNNNNNNNNNNNNNTAAAGGACGGGTGGCATCCCTGTGACCCCTCCCCAGTGCCTCTC |
| | | CTGGCCCTGGAAGTTGCCACTCCAGTGCCCACCAGCCTTGTCCTAATAAAATTAAGTTGC |
| | | ATCATTTTGTCTGACTAGGTGTCCTTCTATAATATTATGGGGTGGAGGGGGGTGGTATGG |
| | | AGCAAGGGGCAAGTTGGGAAGACAACCTGTAGGGCCTGCGGGGTCTATTGGGAACCAAGC |
| | | TGGAGTGCAGTGGCACAATCTTGGCTCACTGCAATCTCCGCCTCCTGGGTTCAAGCGATT |
| | | CTCCTGCCTCAGCCTCCCGAGTTGTTGGGATTCCAGGCATGCATGACCAGGCTCAGCTAA |
| | | TTTTTGTTTTTTTGGTAGAAACGGGGTTTCACCATATTGGCCAGGCTGGTCTCCAACTCC |
| | | TAATCTCAGGTGATCTACCCACCTTGGCCTCCCAAATTGCTGGGATTACAGGCGTGAACC |
| | | ACTGCTCCCTTCCCTGTCCTTC |
| | | (NNNNNNNNNNNNNNNNNNNNNNNNNNNNNN can be absent or can encode |
| | | a transgene of any length) |
| 983 | FAS- | GGATCTGCGATCGCTCCGGTGCCCGTCAGTGGGCAGAGCGCACATCGCCCACAGTCCCCG |
| | TGFBR2- | AGAAGTTGGGGGGAGGGGTCGGCAATTGAACGGGTGCCTAGAGAAGGTGGCGCGGGGTAA |
| | TGFBR2 | ACTGGGAAAGTGATGTCGTGTACTGGCTCCGCCTTTTTCCCGAGGGTGGGGGAGAACCGT |
| | architecture 3 | ATATAAGTGCAGTAGTCGCCGTGAACGTTCTTTTTCGCAACGGGTTTGCCGCCAGAACAC |
| | (3G-E-3G) | AGCTGAAGCTTCGAGGGGCTCGCATCTCTCCTTCACGCGCCCGCCGCCCTACCTGAGGCC |
| | triple shRNA | GCCATCCACGCCGGTTGAGTCGCGTTCTGCCGCCTCCCGCCTGTGGTGCCTCCTGAACTG |
| | module, 5′ | CGTCCGCCGTCTAGGTAAGTCGACTCGTTGGATCCCCACTACCCGGATCAACGCCCTAGG |
| | end | TTTATGTTTGGATGAACTGACATACGCGTATCCGTCTTAAGAATCTTTTCAAACACTAGT |
| | | AGTGAAATATATATTAAACTAGTGTTTGAAAAGATTCTTATTACGGTAACGCGGAATTCG |
| | | CAACTATTTTATCAATTTTTTGCGTCGACACTTCAAGGGGCTTGCGGCCGCAACCATCTC |
| | | CATGGCGACGGTGACTTAGGAGTATGTGTTTGAATGAGGCTTCAGTACTTTACAGAATCG |
| | | TTGCCTGCACATCTTGGAAACACTTGCTGGGATTACTTCGACTTCTTAACCCAACAGAAG |
| | | GCTCGAGAAGGTATATTGCTGTTGACAGTGAGCGCAGGAAATGAGATTGATTTTTTTAGT |
| | | GAAGCCACAGATGTATAAAAATCAATCTCATTTCCTGTGCCTACTGCCTCGGACTTCAAG |
| | | GGGCTAGAATTCGAGCAATTATCTTGTTTACTAAAACTGAATACCTTGCTATCTCTTTGA |
| | | TACATTTTTACAAAGCTGAATTAAAATGGTATAAATTAAATCACTTTGACTGTGACAGCA |
| | | GAGTATGCCGGATCAACGCCCTAGGTTTATGTTTGGATGAACTGACATACGCGTATCCGT |
| | | CTTATGTAAAAGACAAACAATGCGTAGTGAAATATATATTAAACGCATTGTTTGTCTTTT |
| | | ACATATTACGGTAACGCGGAATTCGCAACTATTTTATCAATTTTTTGCGTCGACCGGAAC |
| | | TATCTTGAAGAGTAGTAGTGGACTAGTGTGACGCTGCTGACCCCTTTCTTTCCCTTCTAC |
| | | AGATCCAAGCTGTGACCGGCGCCTACACCTGCAGCCCAAGCTTACC |
| 984 | FAS- | TAAAGGACGGGTGGCATCCCTGTGACCCCTCCCCAGTGCCTCTCCTGGCCCTGGAAGTTG |
| | TGFBR2- | CCACTCCAGTGCCCACCAGCCTTGTCCTAATAAAATTAAGTTGCATCATTTTGTCTGACT |
| | TGFBR2 | AGGTGTCCTTCTATAATATTATGGGGTGGAGGGGGGTGGTATGGAGCAAGGGGCAAGTTG |
| | architecture 3 | GGAAGACAACCTGTAGGGCCTGCGGGGTCTATTGGGAACCAAGCTGGAGTGCAGTGGCAC |
| | (3G-E-3G) | AATCTTGGCTCACTGCAATCTCCGCCTCCTGGGTTCAAGCGATTCTCCTGCCTCAGCCTC |
| | triple shRNA | CCGAGTTGTTGGGATTCCAGGCATGCATGACCAGGCTCAGCTAATTTTTGTTTTTTTGGT |
| | module, 3′ | AGAAACGGGGTTTCACCATATTGGCCAGGCTGGTCTCCAACTCCTAATCTCAGGTGATCT |
| | end | ACCCACCTTGGCCTCCCAAATTGCTGGGATTACAGGCGTGAACCACTGCTCCCTTCCCTG |
| | | TCCTTC |
| 985 | FAS- | CGGATCAACGCCCTAGGTTTATGTTTGGATGAACTGACATACGCGTATCCGTCTTAAGAA |
| | TGFBR2- | TCTTTTCAAACACTAGTAGTGAAATATATATTAAACTAGTGTTTGAAAAGATTCTTATTA |
| | TGFBR2 | CGGTAACGCGGAATTCGCAACTATTTTATCAATTTTTTGCGTCGACACTTCAAGGGGCTT |
| | (3G-E-3G) | GCGGCCGCAACCATCTCCATGGCGACGGTGACTTAGGAGTATGTGTTTGAATGAGGCTTC |
| | triple shRNA | AGTACTTTACAGAATCGTTGCCTGCACATCTTGGAAACACTTGCTGGGATTACTTCGACT |
| | module | TCTTAACCCAACAGAAGGCTCGAGAAGGTATATTGCTGTTGACAGTGAGCGCAGGAAATG |
| | | AGATTGATTTTTTTAGTGAAGCCACAGATGTATAAAAATCAATCTCATTTCCTGTGCCTA |
| | | CTGCCTCGGACTTCAAGGGGCTAGAATTCGAGCAATTATCTTGTTTACTAAAACTGAATA |
| | | CCTTGCTATCTCTTTGATACATTTTTACAAAGCTGAATTAAAATGGTATAAATTAAATCA |
| | | CTTTGACTGTGACAGCAGAGTATGCCGGATCAACGCCCTAGGTTTATGTTTGGATGAACT |
| | | GACATACGCGTATCCGTCTTATGTAAAAGACAAACAATGCGTAGTGAAATATATATTAAA |
| | | CGCATTGTTTGTCTTTTACATATTACGGTAACGCGGAATTCGCAACTATTTTATCAATTT |
| | | TTTGCGTCGAC |
| 986 | TGFBR2_23- | TGTTTGAATGAGGCTTCAGTACTTTACAGAATCGTTGCCTGCACATCTTGGAAACACTTG |
| | TGBR2_37 | CTGGGATTACTTCGACTTCTTAACCCAACAGAAGGCTCGAGAAGGTATATTGCTGTTGAC |
| | miR3G and | AGTGAGCGCAGGAAATGAGATTGATTTTTTTAGTGAAGCCACAGATGTATAAAAATCAAT |
| | miR3E | CTCATTTCCTGTGCCTACTGCCTCGGACTTCAAGGGGCTAGAATTCGAGCAATTATCTTG |
| | Module | TTTACTAAAACTGAATACCTTGCTATCTCTTTGATACATTTTTACAAAGCTGAATTAAAA |
| | | TGGTATAAATTAAATCACTTTGACTGTGACAGCAGAGTATGCCGGATCAACGCCCTAGGT |
| | | TTATGTTTGGATGAACTGACATACGCGTATCCGTCTTATGTAAAAGACAAACAATGCGTA |
| | | GTGAAATATATATTAAACGCATTGTTTGTCTTTTACATATTACGGTAACGCGGAATTCGC |
| | | AACTATTTTATCAATTTTTTGCGTCGAC |
| 987 | TGFBR2- | CCGGATCAACGCCCTAGGTTTATGTTTGGATGAACTGACATACGCGTATCCGTCTAAAAA |
| | TGFBR2- | TCAATCTCATTTCCTGGTAGTGAAATATATATTAAACCAGGAAATGAGATTGATTTTTTT |
| | FAS miR3G | ACGGTAACGCGGAATTCGCAACTATTTTATCAATTTTTTGCGTCGACACTTCAAGGGGCT |
| | triple shRNA | TGCGGCCGCAACCATCTCCATGGCGACGGTGACTTAGGAGTATGCCGGATCAACGCCCTA |
| | module | GGTTTATGTTTGGATGAACTGACATACGCGTATCCGTCTTATGTAAAAGACAAACAATGC |
| | | GTAGTGAAATATATATTAAACGCATTGTTTGTCTTTTACATATTACGGTAACGCGGAATT |
| | | CGCAACTATTTTATCAATTTTTTGCGTCGACGACTGTGACAGCAGAGTATGCCGGATCAA |
| | | CGCCCTAGGTTTATGTTTGGATGAACTGACATACGCGTATCCGTCTTAAGAATCTTTTCA |
| | | AACACTAGTAGTGAAATATATATTAAACTAGTGTTTGAAAAGATTCTTATTACGGTAACG |
| | | CGGAATTCGCAACTATTTTATCAATTTTTTGCGTCGAC |
| 988 | FAS-PTPN2- | GGATCTGCGATCGCTCCGGTGCCCGTCAGTGGGCAGAGCGCACATCGCCCACAGTCCCCG |
| | TGFBR2- | AGAAGTTGGGGGGAGGGGTCGGCAATTGAACGGGTGCCTAGAGAAGGTGGCGCGGGGTAA |
| | TGFBR2 | ACTGGGAAAGTGATGTCGTGTACTGGCTCCGCCTTTTTCCCGAGGGTGGGGGAGAACCGT |
| | quadruple | ATATAAGTGCAGTAGTCGCCGTGAACGTTCTTTTTCGCAACGGGTTTGCCGCCAGAACAC |
| | shRNA | AGCTGAAGCTTCGAGGGGCTCGCATCTCTCCTTCACGCGCCCGCCGCCCTACCTGAGGCC |
| | module, with | GCCATCCACGCCGGTTGAGTCGCGTTCTGCCGCCTCCCGCCTGTGGTGCCTCCTGAACTG |
| | potential | CGTCCGCCGTCTAGGTAAGTCGACTCGTTGGATCCCCACTACCCGGATCAACGCCCTAGG |
| | transgene | TTTATGTTTGGATGAACTGACATACGCGTATCCGTCTTAAGAATCTTTTCAAACACTAGT |
| | insert | AGTGAAATATATATTAAACTAGTGTTTGAAAAGATTCTTATTACGGTAACGCGGAATTCG |
| | | CAACTATTTTATCAATTTTTTGCGTCGACACTTCAAGGGGCTTGCGGCCGCAACCATCTC |
| | | CATGGCTGTTTGAATGAGGCTTCAGTACTTTACAGAATCGTTGCCTGCACATCTTGGAAA |
| | | CACTTGCTGGGATTACTTCGACTTCTTAACCCAACAGAAGGCTCGAGAAGGTATATTGCT |
| | | GTTGACAGTGAGCGCCAGTGTGAAGCTCTTGTCAGATAGTGAAGCCACAGATGTATCTGA |
| | | CAAGAGCTTCACACTGATGCCTACTGCCTCGGACTTCAAGGGGCTAGAATTCGAGCAATT |
| | | ATCTTGTTTACTAAAACTGAATACCTTGCTATCTCTTTGATACATTTTTACAAAGCTGAA |
| | | TTAAAATGGTATAAATTAAATCACTTTGACGGTGACTTAGGAGTATGCCGGATCAACGCC |
| | | CTAGGTTTATGTTTGGATGAACTGACATACGCGTATCCGTCTAAAAATCAATCTCATTTC |
| | | CTGGTAGTGAAATATATATTAAACCAGGAAATGAGATTGATTTTTTTACGGTAACGCGGA |
| | | ATTCGCAACTATTTTATCAATTTTTTGCGTCGACGACTGTGACAGCAGAGTATGCCGGAT |
| | | CAACGCCCTAGGTTTATGTTTGGATGAACTGACATACGCGTATCCGTCTTATGTAAAAGA |
| | | CAAACAATGCGTAGTGAAATATATATTAAACGCATTGTTTGTCTTTTACATATTACGGTA |
| | | ACGCGGAATTCGCAACTATTTTATCAATTTTTTGCGTCGACCGGAACTATCTTGAAGAGT |
| | | AGTAGTGGACTAGTGTGACGCTGCTGACCCCTTTCTTTCCCTTCTACAGATCCAAGCTGT |
| | | GACCGGCGCCTACACCTGCAGCCCAAGCTTACCNNNNNNNNNNNNNNNNNNNNNNNNNNN |
| | | NNNTAAAGGACGGGTGGCATCCCTGTGACCCCTCCCCAGTGCCTCTCCTGGCCCTGGAAG |
| | | TTGCCACTCCAGTGCCCACCAGCCTTGTCCTAATAAAATTAAGTTGCATCATTTTGTCTG |
| | | ACTAGGTGTCCTTCTATAATATTATGGGGTGGAGGGGGGTGGTATGGAGCAAGGGGCAAG |
| | | TTGGGAAGACAACCTGTAGGGCCTGCGGGGTCTATTGGGAACCAAGCTGGAGTGCAGTGG |
| | | CACAATCTTGGCTCACTGCAATCTCCGCCTCCTGGGTTCAAGCGATTCTCCTGCCTCAGC |
| | | CTCCCGAGTTGTTGGGATTCCAGGCATGCATGACCAGGCTCAGCTAATTTTTGTTTTTTT |
| | | GGTAGAAACGGGGTTTCACCATATTGGCCAGGCTGGTCTCCAACTCCTAATCTCAGGTGA |
| | | TCTACCCACCTTGGCCTCCCAAATTGCTGGGATTACAGGCGTGAACCACTGCTCCCTTCC |
| | | CTGTCCTTC |
| | | (NNNNNNNNNNNNNNNNNNNNNNNNNNNNNN can be absent or can encode |
| | | a transgene of any length) |
| 989 | FAS-PTPN2- | GGATCTGCGATCGCTCCGGTGCCCGTCAGTGGGCAGAGCGCACATCGCCCACAGTCCCCG |
| | TGFBR2- | AGAAGTTGGGGGGAGGGGTCGGCAATTGAACGGGTGCCTAGAGAAGGTGGCGCGGGGTAA |
| | TGFBR2 | ACTGGGAAAGTGATGTCGTGTACTGGCTCCGCCTTTTTCCCGAGGGTGGGGGAGAACCGT |
| | quadruple | ATATAAGTGCAGTAGTCGCCGTGAACGTTCTTTTTCGCAACGGGTTTGCCGCCAGAACAC |
| | shRNA | AGCTGAAGCTTCGAGGGGCTCGCATCTCTCCTTCACGCGCCCGCCGCCCTACCTGAGGCC |
| | module, 5′ | GCCATCCACGCCGGTTGAGTCGCGTTCTGCCGCCTCCCGCCTGTGGTGCCTCCTGAACTG |
| | end | CGTCCGCCGTCTAGGTAAGTCGACTCGTTGGATCCCCACTACCCGGATCAACGCCCTAGG |
| | | TTTATGTTTGGATGAACTGACATACGCGTATCCGTCTTAAGAATCTTTTCAAACACTAGT |
| | | AGTGAAATATATATTAAACTAGTGTTTGAAAAGATTCTTATTACGGTAACGCGGAATTCG |
| | | CAACTATTTTATCAATTTTTTGCGTCGACACTTCAAGGGGCTTGCGGCCGCAACCATCTC |
| | | CATGGCTGTTTGAATGAGGCTTCAGTACTTTACAGAATCGTTGCCTGCACATCTTGGAAA |
| | | CACTTGCTGGGATTACTTCGACTTCTTAACCCAACAGAAGGCTCGAGAAGGTATATTGCT |
| | | GTTGACAGTGAGCGCCAGTGTGAAGCTCTTGTCAGATAGTGAAGCCACAGATGTATCTGA |
| | | CAAGAGCTTCACACTGATGCCTACTGCCTCGGACTTCAAGGGGCTAGAATTCGAGCAATT |
| | | ATCTTGTTTACTAAAACTGAATACCTTGCTATCTCTTTGATACATTTTTACAAAGCTGAA |
| | | TTAAAATGGTATAAATTAAATCACTTTGACGGTGACTTAGGAGTATGCCGGATCAACGCC |
| | | CTAGGTTTATGTTTGGATGAACTGACATACGCGTATCCGTCTAAAAATCAATCTCATTTC |
| | | CTGGTAGTGAAATATATATTAAACCAGGAAATGAGATTGATTTTTTTACGGTAACGCGGA |
| | | ATTCGCAACTATTTTATCAATTTTTTGCGTCGACGACTGTGACAGCAGAGTATGCCGGAT |
| | | CAACGCCCTAGGTTTATGTTTGGATGAACTGACATACGCGTATCCGTCTTATGTAAAAGA |
| | | CAAACAATGCGTAGTGAAATATATATTAAACGCATTGTTTGTCTTTTACATATTACGGTA |
| | | ACGCGGAATTCGCAACTATTTTATCAATTTTTTGCGTCGACCGGAACTATCTTGAAGAGT |
| | | AGTAGTGGACTAGTGTGACGCTGCTGACCCCTTTCTTTCCCTTCTACAGATCCAAGCTGT |
| | | GACCGGCGCCTACACCTGCAGCCCAAGCTTACC |
| 990 | FAS-PTPN2- | TAAAGGACGGGTGGCATCCCTGTGACCCCTCCCCAGTGCCTCTCCTGGCCCTGGAAGTTG |
| | TGFBR2- | CCACTCCAGTGCCCACCAGCCTTGTCCTAATAAAATTAAGTTGCATCATTTTGTCTGACT |
| | TGFBR2 | AGGTGTCCTTCTATAATATTATGGGGTGGAGGGGGGTGGTATGGAGCAAGGGGCAAGTTG |
| | quadruple | GGAAGACAACCTGTAGGGCCTGCGGGGTCTATTGGGAACCAAGCTGGAGTGCAGTGGCAC |
| | shRNA | AATCTTGGCTCACTGCAATCTCCGCCTCCTGGGTTCAAGCGATTCTCCTGCCTCAGCCTC |
| | module, 3′ | CCGAGTTGTTGGGATTCCAGGCATGCATGACCAGGCTCAGCTAATTTTTGTTTTTTTGGT |
| | end | AGAAACGGGGTTTCACCATATTGGCCAGGCTGGTCTCCAACTCCTAATCTCAGGTGATCT |
| | | ACCCACCTTGGCCTCCCAAATTGCTGGGATTACAGGCGTGAACCACTGCTCCCTTCCCTG |
| | | TCCTTC |

[0665] As used herein, “target gene” refers to a nucleic acid sequence in a cell, wherein the expression of the sequence may be specifically and effectively modulated using the nucleic acid molecules and methods described herein. In certain embodiments, the target gene may be implicated in the growth (proliferation), maintenance (survival), and/or immune behavior of an individual's immune cells. In some embodiments, the target gene is FAS. In some embodiments, the target gene is PTPN2. In some embodiments, the target gene is Transforming Growth Factor Beta Receptor 2 (TGFBR2). In some embodiments, two or more nucleic acid molecules target the TFGBR2 gene. In some embodiments, the target gene is Transforming Growth Factor Beta Receptor 1 (TGFBR1). In some embodiments, more than one target gene is modulated using a nucleic acid molecule and methods described herein. In some embodiments, at least two target genes are modulated using the nucleic acid molecules and methods described herein. In some embodiments, the nucleic acid molecule(s) is an shRNA. In some embodiments, the target genes are at least TGFBR1 and TGFBR2. In some embodiments, the target genes are at least FAS and TGFBR2. In some embodiments, the target genes are at least FAS, TGFBR1, and TGFBR2. In some embodiments, the target genes are at least FAS, TGFBR2, and PTPN2. In some embodiments, the target genes are at least FAS, PTPN2, TGFBR1, and TGFBR2.

[0666] In one aspect, provided herein are nucleic acids comprising a nucleic acid sequence at least 15 nucleotides in length complementary to a portion of the nucleic acid sequence encoding human Transforming Growth Factor Beta Receptor 2 (TGFBR2) (SEQ ID NO: 965). In some embodiments, the nucleic acid comprises a nucleic acid sequence at least 15 nucleotides in length complementary to nucleotides 2215-2236, 4430-4451, or 3761-3782 of the nucleic acid sequence encoding human Transforming Growth Factor Beta Receptor 2 (TGFBR2) set forth in SEQ ID NO: 965. In some embodiments, the nucleic acid comprises a sequence selected from the group consisting of the sequences set forth in SEQ ID NOs: 969 or 970. In some embodiments, the nucleic acid comprises the sequences set forth in SEQ ID NOs: 969 and 970.

[0667] In one aspect, provided herein are nucleic acids comprising a nucleic acid sequence at least 15 nucleotides in length complementary to a nucleic acid encoding human Transforming Growth Factor Beta Receptor 2 (TGFBR2) (SEQ ID NO: 965), wherein the nucleic acid sequence at least 15 nucleotides in length is at least 80%, 85%, 90%, 91%, 92%, 93%, 94%, 95%, 96%, 97%, 98%, 99%, or 100% complementary to a portion of the nucleic acid sequence encoding human Transforming Growth Factor Beta Receptor 2 (TGFBR2) (SEQ ID NO: 965). In some embodiments, the nucleic acid comprises at least 80%, 85%, 90%, 91%, 92%, 93%, 94%, 95%, 96%, 97%, 98%, 99%, or 100% identity to a sequence selected from the group consisting of the sequences set forth in SEQ ID NOs: 969 or 970. In some embodiments, the nucleic acid comprises at least two sequences with at least 80%, 85%, 90%, 91%, 92%, 93%, 94%, 95%, 96%, 97%, 98%, 99%, or 100% identity to a sequence selected from the group consisting of the sequences set forth in SEQ ID NOs: 969 or 970.

[0668] In some embodiments, the nucleic acid comprises a nucleic acid sequence at least 15 nucleotides in length complementary to a portion of a nucleic acid sequence encoding human Fas Cell Surface Death Receptor (FAS) set forth in SEQ ID NO: 964. In some embodiments, the nucleic acid comprises a sequence as set forth in SEQ ID NO: 967. In some embodiments, the nucleic acid sequence is complementary to nucleotides 1126 to 1364 of a nucleic acid encoding human FAS set forth in SEQ ID NO: 964. In some embodiments, the nucleic acid sequence is complementary to nucleotides 1126 to 1147 of a nucleic acid encoding human FAS set forth in SEQ ID NO: 964. In some embodiments, the nucleic acid sequence is complementary to nucleotides 1126 to 1147 of a nucleic acid encoding human FAS set forth in SEQ ID NO: 964.

[0669] In one aspect, provided herein are nucleic acid comprising a nucleic acid sequence at least 15 nucleotides in length complementary to a nucleic acid encoding human FAS set forth in SEQ ID NO: 964, wherein the nucleic acid sequence at least 15 nucleotides in length is at least 80%, 85%, 90%, 91%, 92%, 93%, 94%, 95%, 96%, 97%, 98%, 99%, or 100% complementary to a nucleic acid encoding human FAS set forth in SEQ ID NO: 964. In some embodiments, the nucleic acid comprises at least 80%, 85%, 90%, 91%, 92%, 93%, 94%, 95%, 96%, 97%, 98%, 99%, or 100% identity to a sequence as set forth in SEQ ID NO: 967.

[0670] In some embodiments, the nucleic acid comprises a nucleic acid sequence at least 15 nucleotides in length complementary to a nucleic acid encoding human Protein Tyrosine Phosphatase Non-Receptor Type 2 (PTPN2) set forth in SEQ ID NO: 966. In some embodiments, the nucleic acid comprises a sequence as set forth in SEQ ID NO: 968. In some embodiments, the nucleic acid sequence is complementary to nucleotides 518-559 of a nucleic acid encoding human PTPN2 set forth in SEQ ID NO: 966. In some embodiments, the nucleic acid sequence is complementary to nucleotides 518-539 of a nucleic acid encoding human PTPN2 set forth in SEQ ID NO: 966.

[0671] In one aspect, provided herein are nucleic acid comprising a nucleic acid sequence at least 15 nucleotides in length complementary to a nucleic acid encoding human Protein Tyrosine Phosphatase Non-Receptor Type 2 (PTPN2) set forth in SEQ ID NO: 966, wherein the nucleic acid sequence at least 15 nucleotides in length is at least 80%, 85%, 90%, 91%, 92%, 93%, 94%, 95%, 96%, 97%, 98%, 99%, or 100% complementary to a nucleic acid encoding human Protein Tyrosine Phosphatase Non-Receptor Type 2 (PTPN2) set forth in SEQ ID NO: 966. In some embodiments, the nucleic acid comprises at least 80%, 85%, 90%, 91%, 92%, 93%, 94%, 95%, 96%, 97%, 98%, 99%, or 100% identity to a sequence as set forth in SEQ ID NOs: 968.

[0672] In some embodiments, the nucleic acid is capable of reducing expression of FAS in the immune cell by at least 10%, 15%, 20%, 25%, 30%, 35%, 40%, 45%, 50%, 55%, 60%, 65%, 75%, 80%, 85%, 90%, 95%, or 99% as compared to a control cell that does not comprise the nucleic acid.

[0673] In some embodiments, the nucleic acid is capable of reducing expression of TGFBR2 in the immune cell by at least 10%, 15%, 20%, 25%, 30%, 35%, 40%, 45%, 50%, 55%, 60%, 65%, 75%, 80%, 85%, 90%, 95%, or 99% as compared to a control cell that does not comprise the nucleic acid.

[0674] In some embodiments, the nucleic acid is capable of reducing expression of PTPN2 in the immune cell by at least 10%, 15%, 20%, 25%, 30%, 35%, 40%, 45%, 50%, 55%, 60%, 65%, 75%, 80%, 85%, 90%, 95%, or 99% as compared to a control cell that does not comprise the nucleic acid.

[0675] In some embodiments, the nucleic acid sequence is at least 16, 17, 18, 19, 20, 21, or 22 nucleotides in length.

[0676] In some embodiments, the nucleic acid is an RNA interference (RNAi) molecule. Exemplary RNAi molecules include short hairpin RNA (shRNA), a small interfering RNA (siRNA), a double stranded RNA (dsRNA), or an antisense oligonucleotide. In some embodiments, the nucleic acid is a short hairpin RNA (shRNA), a small interfering RNA (siRNA), a double stranded RNA (dsRNA), or an antisense oligonucleotide. In some embodiments, the nucleic acid is an shRNA.

[0677] Single-stranded hairpin ribonucleic acids (shRNAs) are short duplexes where the sense and antisense strands are linked by a hairpin loop. They consist of a stem-loop structure that can be transcribed in cells from an RNA polymerase II or RNA polymerase III promoter on a plasmid construct. Once expressed, shRNAs are processed into RNAi species. Expression of shRNA from a plasmid is known to be relatively stable, thereby providing strong advantages over, for example, the use of synthetic siRNAs. shRNA expression units may be incorporated into a variety of plasmids, liposomes, viral vectors, and other vehicles for delivery and integration into a target cell. Expression of shRNA from a plasmid can be stably integrated for constitutive expression. shRNAs are synthesized in the nucleus of cells, further processed and transported to the cytoplasm, and then incorporated into the RNA-induced silencing complex (RISC) for activity. The shRNAs are converted into active siRNA molecules (which are capable of binding to, sequestering, and/or preventing the translation of mRNA transcripts encoded by target genes).

[0678] The Argonaute family of proteins is the major component of RISC. Within the Argonaute family of proteins, only Ago2 contains endonuclease activity that is capable of cleaving and releasing the passenger strand from the stem portion of the shRNA molecule. The remaining three members of Argonaute family, Ago1, Ago3 and Ago4, which do not have identifiable endonuclease activity, are also assembled into RISC and are believed to function through a cleavage-independent manner. Thus, RISC can be characterized as having cleavage-dependent and cleavage-independent pathways.

[0679] RNAi (e.g., antisense RNA, siRNA, microRNA, shRNA, etc.) are described in International Publication Nos. WO2018232356A1, WO2019084552A1, WO2019226998A1, WO2020014235A1, WO2020123871A1, and WO2020186219A1, each of which is herein incorporated by reference for all purposes.

[0680] Antisense oligonucleotide structure and chemical modifications are described in International PCT Publication No. WO20/132521, which is hereby incorporated by reference.

[0681] dsRNA and shRNA molecules and methods of use and production are described in U.S. Pat. Nos. 8,829,264; 9,556,431; and 8,252,526, each of which are hereby incorporated by reference

[0682] siRNA molecules and methods of use and production are described in U.S. Pat. No. 7,361,752 and US Patent Application No. US20050048647, both of which are hereby incorporated by reference.

[0683] Additional methods and compositions for RNA interference such as shRNA, siRNA, dsRNA, and antisense oligonucleotides are generally known in the art, and are further described in U.S. Pat. Nos. 7,361,752; 8,829,264; 9,556,431; 8,252,526, International PCT Publication No. WO00/44895; International PCT Publication No. WO01/36646; International PCT Publication No. WO99/32619; International PCT Publication No. WO00/01846; International PCT Publication No. WO01/29058; and International PCT Publication No. WO00/44914; International PCT Publication No. WO04/030634; International PCT Publication No. WO 2024059618; each of which are hereby incorporated by reference.

[0684] The nucleic acid sequences (or constructs) that may be used to encode the RNAi molecules, such as an shRNA described herein, may comprise a promoter, which is operably linked (or connected), directly or indirectly, to a sequence encoding the RNAi molecules. Such promoters may be selected based on the host cell and the effect sought. Non-limiting examples of suitable promoters include constitutive and inducible promoters, such as EF1α or inducible Hepatocyte Nuclear Factor 1α (HNF1α)-YB TATA or RNA polymerase II (pol II)-based promoters. In some embodiments, the constitutive promoter is EF1α. In some embodiments, the EF1α promoter comprises as sequence as set forth in SEQ ID NO: 991. Non-limiting examples of suitable promoters further include the tetracycline inducible or repressible promoter, RNA polymerase I or III-based promoters, the pol II dependent viral promoters, such as the CMV-IE promoter, and the pol III U6 and H1 promoters, as well as Hepatocyte Nuclear Factor 1α (HNF1α)-YB TATA promotor provided in SEQ ID NO: 992. The bacteriophage T7 promoter may also be used (in which case it will be appreciated that the T7 polymerase must also be present). The nucleic acid sequences need not be restricted to the use of any single promoter, especially since the nucleic acid sequences may comprise two or more shRNAs (i.e., a combination of effectors), including but not limited to incorporated shRNA molecules. Each incorporated promoter may control one, or any combination of, the shRNA molecule components.

[0685] In certain embodiments, the promoter may be preferentially active in the targeted cells, e.g., it may be desirable to preferentially express at least one nucleic acid in immune cells using an immune cell-specific promoter. Introduction of such constructs into host cells may be effected under conditions whereby the two or more nucleic acids that are contained within the nucleic acid precursor transcript initially reside within a single primary transcript, such that the separate RNA molecules (for example, shRNA each comprising its own stem-loop structure) are subsequently excised from such precursor transcript by an endogenous ribonuclease. The resulting mature nucleic acids (e.g., shRNAs) may then induce degradation, and/or translation repression, of target gene nucleic acid (e.g., mRNA) transcripts produced in the cell. Alternatively, each of the precursor stem-loop structures may be produced as part of a separate transcript, in which case each nucleic acid sequence will preferably include its own promoter and transcription terminator sequences. Additionally, the multiple nucleic acid precursor transcripts may reside within a single primary transcript.

[0686] The stem-loop structures of the shRNA nucleic acids described herein may be about 40 to 100 nucleotides long or, preferably, about 50 to 75 nucleotides long. The stem region may be about 15-45 nucleotides in length (or more), or about 20-30 nucleotides in length. In some embodiments, the stem region is 22 nucleotides in length. In some embodiments, the stem region is 15, 16, 17, 18, 19, 20, 21, 22, 23, 24, 25, 26, 27 28 29, 30, 31, 32, 33, 34, 35, 36, 37, 38, 39, 40, 41, 42, 43, 44, or 45 nucleotides in length.

[0687] The stem may comprise a perfectly complementary duplex (but for any 3′ tail), however, bulges or interior loops may be present on either arm of the stem. The number of such bulges and asymmetric interior loops are preferably few in number (e.g., 1, 2 or 3) and are about 3 nucleotides or less in size. The terminal loop portion may comprise about 4 or more nucleotides, but preferably not more than about 25. The loop portion will preferably be 6-15 nucleotides in size.

[0688] As described herein, the stem regions of the shRNAs comprise passenger strands and guide strands, whereby the guide strands contain sequences complementary to the target nucleic acid (e.g., mRNA) transcript encoded by the target gene(s). Preferably, the G-C content and matching of guide strand and passenger strand is carefully designed for thermodynamically-favorable strand unwind activity with or without endonuclease cleavage. Furthermore, the specificity of the guide strand is preferably confirmed via a BLAST search (www.ncbi.nim.nih.gov/BLAST).

[0689] The disclosure herein provides that the expression level of multiple target genes may be modulated using the methods and nucleic acids described herein. For example, the disclosure herein provides that a first set of nucleic acids may be designed to include a sequence (a guide strand) that is designed to reduce the expression level of a first target gene, whereas a second set of nucleic acids may be designed to include a sequence (a guide strand) that is designed to reduce the expression level of a second target gene. The different sets of nucleic acids may be expressed and reside within the same, or separate, preliminary transcripts. In certain embodiments, such multiplex approach, i.e., the use of the nucleic acids described herein to modulate the expression level of two or more target genes, may have an enhanced therapeutic effect on a patient. For example, if a patient is provided with cells expressing the nucleic acid molecules described herein to treat, prevent, or ameliorate the effects of cancer, it may be desirable to provide the patient with two or more types of nucleic acid molecules, which are designed to reduce the expression level of multiple genes that are implicated in activation or repression of immune cells.

[0690] The nucleic acid molecule(s) described herein may be capable of reducing target gene expression in a cell by at least more than about 50% as compared to a control cell that does not comprise the nucleic acid molecule(s). For example, the nucleic acid molecule(s) (e.g., shRNA) can be capable of reducing expression of a target gene selected from the group consisting of FAS and TGBFR2 in the immune cell by at least 10%, 15%, 20%, 25%, 30%, 35%, 40%, 45%, 50%, 55%, 60%, 65%, 75%, 80%, 85%, 90%, 95%, 97%, 98%, 99%, or more as compared to a control cell that does not comprise the nucleic acid molecule(s). The nucleic acid molecule(s) can be capable of reducing expression of a target gene selected from the group consisting of FAS and TGBFR2 in the immune cell by at least between about 50-100%, 50-99%, 50-95%, 50-90%, 50-85%, 50-80%, 50-75%, 50-70%, 50-65%, 50-60%, 50-55%, or as compared to a control cell that does not comprise the nucleic acid molecule(s). In some embodiments, the nucleic acid molecule(s) is capable of reducing expression of FAS in the immune cell by at least 10%, 15%, 20%, 25%, 30%, 35%, 40%, 45%, 50%, 55%, 60%, 65%, 75%, 80%, 85%, 90%, 95%, or 99% as compared to a control cell that does not comprise the nucleic acid molecule(s). In some embodiments, the nucleic acid molecule(s) is capable of reducing expression of FAS in the immune cell by at least 10%, 15%, 20%, 25%, 30%, 35%, 40%, 45%, 50%, 55%, 60%, 65%, 75%, 80%, 85%, 90%, 95%, or 99% as compared to a control cell that does not comprise the nucleic acid molecule(s). In some embodiments, the nucleic acid molecule(s) is capable of reducing expression of TGBFR2 in the immune cell by at least 10%, 15%, 20%, 25%, 30%, 35%, 40%, 45%, 50%, 55%, 60%, 65%, 75%, 80%, 85%, 90%, 95%, or 99% as compared to a control cell that does not comprise the nucleic acid molecule(s).

[0691] The nucleic acid molecule(s) may be chemically synthesized, or in vitro transcribed, and may further include one or more modifications to phosphate-sugar backbone or nucleosides residues.

[0692] Other methods known in the art for introducing nucleic acids to cells may be used, such as lipid-mediated carrier transport, chemical mediated transport, such as calcium phosphate, and the like. Thus, the nucleic acid molecule(s) construct may be introduced along with components that perform one or more of the following activities: enhance RNA uptake by the cell, promote annealing of the duplex strands for shRNA, stabilize the annealed shRNA strands, or otherwise increase inhibition of the target gene.

### Nucleic Acids and Vectors

[0693] In various embodiments, the present disclosure contemplates nucleic acid inserts that comprise one or more transgenes encoding the priming receptors, CARs, or suppressors of gene expression as described herein. In some embodiments, the nucleic acids are recombinant nucleic acids. In some embodiments, the nucleic acids are synthetic nucleic acids. In some embodiments, the insert encodes a priming receptor transgene. In some embodiments, the insert encodes a CAR transgene. In some embodiments, the insert comprises one or more suppressors of gene expression. In some embodiments, the insert comprises a priming receptor transgene and a CAR transgene. In some embodiments, the insert comprises a priming receptor transgene and one or more suppressors of gene expression. In some embodiments, the insert comprises a CAR transgene and one or more suppressors of gene expression. In some embodiments, the insert comprises a CAR transgene, a priming receptor transgene, and a suppressor of gene expression.

[0694] In one aspect, provided herein are nucleic acids comprising a nucleotide sequence that is at least 95%, 96%, 97%, 98%, 99%, or 100% identical to SEQ ID NO: 1242, which contains functional domains and wherein the activity of the functional domains is not altered relative to those in a nucleic acid comprising or consisting of SEQ ID NO: 1242. For example, the nucleotide differences can be silent substitutions, additions or deletions of nucleotides.

[0695] In one aspect, provided herein are nucleic acids comprising a nucleotide sequence that is at least 95%, 96%, 97%, 98%, 99%, or 100% identical to SEQ ID NO: 1124, which contains functional domains and wherein the activity of the functional domains is not altered relative to those in a nucleic acid comprising or consisting of SEQ ID NO: 1124. For example, the nucleotide differences can be silent substitutions, additions or deletions of nucleotides.

[0696] In one aspect, provided herein is a nucleic acid comprising SEQ ID NO: 1242, or a nucleic acid at least 95%, 96%, 97%, 98%, 99%, or 100% identical to SEQ ID NO: 1242.

[0697] In one aspect, provided herein is a nucleic acid comprising SEQ ID NO: 1124, or a nucleic acid at least 95%, 96%, 97%, 98%, 99%, or 100% identical to SEQ ID NO: 1124.

[0698] In some embodiments, the nucleic acid is a linear nucleic acid. In some embodiments, the nucleic acid is a circular nucleic acid. In some embodiments, the nucleic acid further comprises an additional 5′ and/or 3′ nucleotide sequence(s). In some embodiments, the additional 5′ and/or 3′ nucleotide sequence(s) comprises from 1-100 nucleotides, optionally 1, 5, 10, 20, 30, 40, 50, 60, 70, 80, 90 or 100 nucleotides or between 1-10, 10-20, 20-30, 30-40, 40-50, 50-60, 60-70, 70-80, 80-90, or 90-100 nucleotides. In some embodiments, the additional 5′ nucleotide sequence and the additional 3′ nucleotide sequence each comprise a protelomerase binding sequence.

[0699] In some embodiments, the nucleic acid is a closed end DNA (ceDNA).

### Additional Elements

[0700] In some embodiments, the one or more nucleic acid(s) further comprises a 5′ homology directed repair arm and/or a 3′ homology directed repair arm complementary to an insertion site in a host cell chromosome. In some embodiments, the one or more nucleic acid(s) comprises the 5′ homology directed repair arm and the 3′ homology directed repair arm. In some embodiments, the one or more nucleic acid(s) is incorporated into an expression cassette or an expression vector. In some embodiments, the expression cassette or the expression vector further comprises a constitutive promoter upstream of the one or more nucleic acid(s).

[0701] For example, in the exemplary Logic Gates provided herein, the nucleotide sequences comprising a 5′ homology directed repair arm and a 3′ homology directed repair arm complementary to the GS94 locus insertion site comprise nucleotides 24-473 and 7258-7707 of SEQ ID NO: 1120; nucleotides 24-473 and 7240-7689 of SEQ ID NO: 1121; nucleotides 24-473 and 7622-8071 of SEQ ID NO: 1122; nucleotides 24-473 and 7637-8086 of SEQ ID NO: 1123; or nucleotides 24-473 and 7622-8071 of SEQ ID NO: 1124. In some embodiments, the vector provided herein comprises nucleotides 24-473 and 7258-7707 of SEQ ID NO: 1120; nucleotides 24-473 and 7240-7689 of SEQ ID NO: 1121; nucleotides 24-473 and 7622-8071 of SEQ ID NO: 1122; nucleotides 24-473 and 7637-8086 of SEQ ID NO: 1123; or nucleotides 24-473 and 7622-8071 of SEQ ID NO: 1124.

[0702] In some embodiments, the nucleotide sequences that are homologous to genomic sequences flanking the GS94 locus insertion site comprise SEQ ID NOs: 1235 and 1236. In some embodiments, the vector comprises homology regions to the gRNA of the RNP complex used for inserting the nucleic acid into the genome of a cell. In some embodiments, the sequences of the gRNA homology regions comprise SEQ ID NOs: 932 and 1237.

[0703] In some embodiments, the priming receptor, CAR, first nucleic acid, and the second nucleic acid are incorporated into a single expression cassette or a single expression vector. In some embodiments, the priming receptor, CAR, first nucleic acid, and the second nucleic acid are incorporated into two or more expression cassettes or expression vectors. In some embodiments, the expression vector(s) is a non-viral vector.

[0704] The one or more interfering nucleic acid sequences (e.g., one or more shRNA) can be encoded in the intron regions of the recombinant nucleic acid insert, DNA template, single expression cassette, or a single expression vector that also encodes the priming receptor and/or the CAR. For example, if the DNA template includes promoters, such as EF1α, or inducible promoters such as the HNF1α-YB TATA promoter, described herein, to drive expression of the CAR or priming receptor, the one or more nucleic acid sequences (e.g., shRNA sequences) can be encoded in the promoter intronic region. In some embodiments, the one or more nucleic acid sequences is encoded in at least one intron region of the nucleic acid insert, module, cassette, or DNA template. In some embodiments, the one or more nucleic acid sequences is encoded in at least one EF1α intron region of the nucleic acid insert, module, cassette, or DNA template.

[0705] In some embodiments, the present disclosure contemplates nucleic acid(s), modules, cassettes, or DNA template inserts that comprise one or more transgenes encoding the priming receptors and/or CARs as described herein. In some embodiments, the DNA template insert or cassette encodes a priming receptor transgene. In some embodiments, the DNA template insert or cassette encodes a chimeric antigen receptor transgene. In some embodiments, the DNA template insert encodes a first nucleic acid complementary to at least 15 nucleotides of a human FAS nucleic acid sequence, and a second nucleic acid complementary to at least 15 nucleotides of a human PTPN2 or TGFBR2 nucleic acid sequence. In some embodiments, the DNA template insert comprises a priming receptor transgene and a chimeric antigen receptor transgene. In some embodiments, the DNA template insert comprises a priming receptor transgene, a chimeric antigen receptor transgene, a first nucleic acid complementary to at least 15 nucleotides of a human FAS nucleic acid A sequence, and a second nucleic acid complementary to at least 15 nucleotides of a human PTPN2 or TGFBR2 nucleic acid sequence. In some embodiments, the DNA template insert comprises a priming receptor transgene, a chimeric antigen receptor transgene, a first nucleic acid complementary to at least 15 nucleotides of a human FAS nucleic acid sequence, and a second nucleic acid complementary to at least 15 nucleotides of a human PTPN2 nucleic acid sequence.

[0706] In some embodiments, the one or more recombinant nucleic acid(s) are encoded on a single DNA template insert. In some embodiments, the one or more recombinant nucleic acid(s) are encoded on multiple DNA template inserts. For example, the one or more recombinant nucleic acid(s) can be encoded on two, three, or four DNA template inserts.

[0707] The DNA template insert can also comprise a self-cleaving peptide. Examples of self-cleaving peptides include, but are not limited to, self-cleaving viral 2A peptides, for example, a porcine teschovirus-1 (P2A) peptide, a Thosea asigna virus (T2A) peptide, an equine rhinitis A virus (E2A) peptide, or a foot-and-mouth disease virus (F2A) peptide. Self-cleaving 2A peptides allow expression of multiple gene products from a single construct. (See, for example, Chang et al. “Cleavage efficient 2A peptides for high level monoclonal antibody expression in CHO cells,” MAbs 7(2): 403-412 (2015)).

[0708] The DNA template insert can also comprise a WPRE element. WPRE elements are generally described in Higashimoto, T., et al. Gene Ther 14, 1298-1304 (2007); and Zufferey, R., et al. J Virol. 1999 April; 73(4):2886-92., both of which are hereby incorporated by reference. An exemplary WPRE element is also provided in SEQ ID NO: 1243.

[0709] The DNA template insert can also comprise a synthetic polyA signal, an SV40 polyA signal, a human growth hormone (GH1) polyA signal, or a bovine growth hormone (bGH) polyA signal. In some embodiments, the polyA signal comprises the sequence as set forth in SEQ ID NOs: 993, 994, 995, or 1244.

[0710] Table 21 provides the sequences of exemplary polyadenylation (polyA) signal sequences.

TABLE 21
Exemplary polyadenylation (polyA) signal sequences

| SEQ | | |
|---|---|---|
| ID | | |
| NO | Name | Sequence |
| 993 | 2X Synthetic | aataaaagatctttaatgaaaatagatctgtgtgttggttttttgtgtg |
| | polyA | aataaaagatccagagctctagagatctgtgtgttggttttttgtgtg |
| 994 | Human GH1 | cgggtggcatccctgtgacccctccccagtgcctctcctggccctggaa |
| | polyA | gttgccactccagtgcccaccagccttgtcctaataaaattaagttgca |
| | | tcattttgtctgactaggtgtccttctataatattatggggtggagggg |
| | | ggggtatggagcaaggggcaagttgggaagacaacctgtagggcctgcg |
| | | gggtctattgggaaccaagctggagtgcagtggcacaatcttggctcac |
| | | tgcaatctccgcctcctgggttcaagcgattctcctgcctcagcctccc |
| | | gagttgttgggattccaggcatgcatgaccaggctcagctaatttttgt |
| | | ttttttggtagaaacggggtttcaccatattggccaggctggtctccaa |
| | | ctcctaatctcaggtgatctacccaccttggcctcccaaattgctggga |
| | | ttacaggcgtgaaccactgctcccttccctgtccttc |
| 995 | Bovine GH | cgactgtgccttctagttgccagccatctgttgtttgcccctcccccgt |
| | polyA | gccttccttgaccctggaaggtgccactcccactgtcctttcctaataa |
| | | aatgaggaaattgcatcgcattgtctgagtaggtgtcattctattctgg |
| | | ggggggggtggggcaggacagcaagggggaggattgggaagacaatagc |
| | | aggcatgctggggatgcggtgggctctatgg |
| 1244 | SV40 polyA | aacttgtttattgcagcttataatggttacaaataaagcaatagcatca |
| | | caaatttcacaaataaagcatttttttcactgcattctagttgtggttt |
| | | gtccaaactcatcaatgtatcttatcatgtctgg |

### Cells

[0711] Also provided herein are cells (e.g., immune cells) comprising at least one DNA template non-virally inserted into a target region of the genome of the cell, wherein DNA template encodes the priming receptor and CAR system as described herein, optionally also the gene expression suppressor molecule. Also provided herein are immune cells comprising a priming receptor that specifically binds SLC43A2 and a chimeric antigen receptor that specifically binds TMPRSS4. The cell can further comprise a gene expression suppressor such as an RNAi molecule (e.g., shRNA) or an sgRNA for CRISPR-based knockout of a target gene.

[0712] A cell, such as a human cell, comprising a DNA template insert at a target locus or safe harbor site as described in the present disclosure can be referred to as an engineered cell, e.g. an engineered human cell, or a recombinant cell, e.g., a recombinant human cell. In some embodiments, the immune cell is any cell that can give rise to a pluripotent immune cell. In some embodiments, the immune cell is a primary immune cell. In some embodiments, the immune cell can be an induced pluripotent stem cell (iPSC) or a human pluripotent stem cell (HSPC). In some embodiments, the immune cell comprises primary hematopoietic cells or primary hematopoietic stem cells. In some embodiments, that engineered cell is a stem cell, a human cell, a primary cell, an hematopoietic cell, an adaptive immune cell, an innate immune cell, a natural killer (NK) cell, a T cell, a CD8+ cell, a CD4+ cell, or a T cell progenitor. In some embodiments, the immune cells are T cells. In some embodiments, the T cells are regulatory T cells, effector T cells, or naïve T cells. In some embodiments, the T cells are CD8⁺ T cells. In some embodiments, the T cells are CD4⁺ T cells. In some embodiments, the T cells are CD4⁺CD8⁺ T cells.

[0713] In some embodiments, the engineered cell is a stem cell, a human cell, a primary cell, an hematopoietic cell, an hematopoietic stem cell, an adaptive immune cell, an innate immune cell, a T cell or a T cell progenitor. Non-limiting examples of immune cells that are contemplated in the present disclosure include T cell, B cell, natural killer (NK) cell, NKT/iNKT cell, macrophage, myeloid cell, and dendritic cells. Non-limiting examples of stem cells that are contemplated in the present disclosure include pluripotent stem cells (PSCs), embryonic stem cells (ESCs), induced pluripotent stem cells (iPSCs), embryo-derived embryonic stem cells obtained by nuclear transfer (ntES; nuclear transfer ES), male germline stem cells (GS cells), embryonic germ cells (EG cells), hematopoietic stem/progenitor stem cells (HSPCs), somatic stem cells (adult stem cells), hemangioblasts, neural stem cells, mesenchymal stem cells and stem cells of other cells (including osteocyte, chondrocyte, myocyte, cardiac myocyte, neuron, tendon cell, adipocyte, pancreocyte, hepatocyte, nephrocyte and follicle cells and so on). In some embodiments, the engineered cells is a T cell, NK cells, iPSC, and HSPC. In some embodiments, the engineered cells used in the present disclosure are human cell lines grown in vitro (e.g., deliberately immortalized cell lines, cancer cell lines, etc.). In some embodiments, the engineered cells are autologous. In some embodiments, the engineered cells are allogeneic.

[0714] In one aspect, provided herein are cells comprising a nucleotide sequence comprising SEQ ID NO: 1242 or a nucleotide sequence that differs therefrom in at most 50 nucleotides, wherein the differences are silent substitutions, additions or deletions.

[0715] In one aspect, provided herein are cells comprising a nucleotide sequence comprising SEQ ID NO: 1124 or a nucleotide sequence that differs therefrom in at most 50 nucleotides, wherein the differences are silent substitutions, additions or deletions.

[0716] In some embodiments, the cell is a human cell. In some embodiments, the cell is a primary cell. In some embodiments, the cell is a T cell. In some embodiments, the cell is manufactured from a cell obtained from a human subject.

[0717] In some embodiments, the cell comprises at least one protein encoded by SEQ ID NO: 1124 or SEQ ID NO: 1242.

[0718] Also provided herein are populations of cells comprising a plurality of the immune cell. In some embodiments, the genome of at least 20%, 30%, 40%, 50%, 60%, 70%, 80%, 90%, 95%, 99% or greater of the cells comprises the priming receptor and CAR system and/or gene suppressor as described herein.

### Methods of Treating Immune-Related Conditions or Diseases

[0719] In one aspect, the disclosure provides methods of treating an immune-related condition (e.g., cancer) in a subject comprising administering to the subject an effective amount of a composition, e.g., a cell or population of cells, comprising a synthetic immune receptor that specifically binds to TMPRSS4 and/or SLC34A2. In one aspect, the invention provides methods of treating an immune-related condition (e.g., cancer) in a subject comprising administering to the subject an effective amount of a cell or population of cells comprising a system comprising a synthetic transcriptional modulator (e.g., a priming receptor) that specifically binds to human SLC34A2 and a synthetic immune receptor (e.g., a CAR) that specifically binds to human TMPRSS4. In some embodiments, the composition further comprises a first nucleic acid sequence at least 15 nucleotides in length, wherein the first nucleic acid sequence is complementary to a portion of the nucleic acid sequence encoding human Fas Cell Surface Death Receptor (FAS) set forth in SEQ ID NO: 964, and at least one second nucleic acid sequence at least 15 nucleotides in length, wherein the second nucleic acid sequence is complementary to a portion of the a nucleic acid sequence encoding human TGFBR2 set forth in SEQ ID NO: 965. In some embodiments, the synthetic immune receptor that specifically binds to TMPRSS4 is a chimeric antigen receptor that specifically binds to TMPRSS4. In some embodiments, the synthetic immune receptor that specifically binds to SLC34A2 is a priming receptor that specifically binds to SLC34A2.

[0720] In one aspect, the disclosure provides methods of enhancing an immune response, e.g., for killing cancer cells, in a subject comprising administering to the subject an effective amount of a composition, e.g., a cell or population of cells, comprising a synthetic immune receptor that specifically binds to human TMPRSS4 and/or human SLC34A2. In one aspect, the disclosure provides methods of enhancing an immune response, e.g., for killing cancer cells, in an individual comprising administering to the subject an effective amount of a composition comprising a system comprising a priming receptor that specifically binds to SLC34A2, a synthetic immune receptor that specifically binds to TMPRSS4, a first nucleic acid sequence at least 15 nucleotides in length, wherein the first nucleic acid sequence is complementary to a nucleic acid encoding human Fas Cell Surface Death Receptor (FAS) set forth in SEQ ID NO: 964, and a second nucleic acid sequence at least 15 nucleotides in length, wherein the second nucleic acid sequence is complementary to a nucleic acid encoding human Phosphatase Non-Receptor Type 2 (PTPN2) set forth in SEQ ID NO: 966; or complementary to a nucleic acid sequence encoding human Transforming Growth factor (TGF)-β Receptor 2 (TGFBR2) set forth in SEQ ID NO: 965.

[0721] In one aspect, the disclosure provides methods of inhibiting (e.g., killing, disabling, causing cytolysis of, or preventing growth or expansion) of a target cell or target tissue that expresses both TMPRSS4 and SLC34A2. In one aspect, the invention provides methods of killing or causing cytolysis of, a target cell or target tissue that expressed both TMPRSS4 and SLC34A2. In some embodiments, the target cell is a cancer cell or the target tissue is a cancer tissue.

[0722] In one aspect, the invention provides methods of inducing cytolysis of a target cell in a subject comprising administering to the subject an effective amount of a composition (such as a cell or a composition of cells (e.g., a population of cells)) comprising a synthetic immune receptor that specifically binds to TMPRSS4 and/or SLC34A2. In one aspect, the invention provides methods of enhancing an immune response in a subject comprising administering to the subject an effective amount of a composition (such as a cell or a composition of cells (e.g., a population of cells) comprising a synthetic immune receptor that specifically binds to TMPRSS4 and/or SLC34A2. In one aspect, the invention provides methods of enhancing an immune response in a subject comprising administering to the subject an effective amount of a composition (such as a cell or a composition of cells (e.g., a population of cells)) comprising a system comprising a priming receptor that specifically binds to SLC34A2, a synthetic immune receptor that specifically binds to TMPRSS4, a first nucleic acid sequence at least 15 nucleotides in length, wherein the first nucleic acid sequence is complementary to a nucleic acid encoding human Fas Cell Surface Death Receptor (FAS) comprising the sequence set forth in SEQ ID NO: 964, and a second nucleic acid sequence at least 15 nucleotides in length, wherein the second nucleic acid sequence is complementary to a nucleic acid encoding human Phosphatase Non-Receptor Type 2 (PTPN2) comprising the sequence set forth in SEQ ID NO: 966; or complementary to a nucleic encoding human Transforming Growth factor (TGF)-β Receptor 2 (TGFBR2) comprising the sequence set forth in SEQ ID NO: 965.

[0723] In some embodiments, the nucleic acid is an shRNA molecule. In some embodiments, the shRNA is selected from the group consisting of a FAS shRNA molecule, a PTPN2 shRNA molecule, and a TGFBR2 shRNA molecule. In some embodiments, the cell comprises at least a FAS shRNA molecule. In some embodiments, the cell comprises at least a PTPN2 shRNA molecule. In some embodiments, the cell comprises at least a TGFBR2 shRNA molecule. In some embodiments, the cell comprises at least a second TGFBR2 shRNA molecule. In some embodiments, the cell comprises at least a FAS shRNA molecule and a PTPN2 shRNA molecule. In some embodiments, the cell comprises at least a FAS shRNA molecule and a TGFBR2 shRNA molecule. In some embodiments, the cell comprises at least a PTPN2 shRNA molecule and a TGFBR2 shRNA molecule. In one aspect, the invention provides methods of enhancing an immune response in a subject comprising administering to the subject an effective amount of a composition comprising a cell comprising at least one shRNA molecule, wherein the shRNA molecule is selected from the group consisting of a FAS shRNA molecule, a PTPN2 shRNA molecule, and a TGFBR2 shRNA molecule.

[0724] In some embodiments, the methods provided herein are useful for the treatment of an immune-related condition in a subject. In some embodiments, the immune-related condition is cancer. In one embodiment, the subject is a human.

[0725] In some embodiments, the methods provided herein (such as methods of enhancing an immune response or inducing cytolysis of a target cell) are useful for the treatment of cancer and as such a subject receiving the system described herein has cancer. In some embodiments, the cancer is a solid cancer. In some embodiments, the cancer is a liquid cancer. In some embodiments, the cancer is immunoevasive. In some embodiments, the cancer is immunoresponsive. In particular embodiments, the cancer is non-small cell lung cancer (NSCLC), ovarian cancer, cervical cancer, endometrial cancer, uterine cancer, pancreatic cancer, esophageal cancer, head and neck squamous cell cancer, thyroid cancer, bladder cancer, breast cancer, cholangiocarcinoma cancer, colon cancer, rectal cancer, kidney cancer, renal cell carcinoma, prostate cancer, stomach cancer, or gastric cancer. In some embodiments, the cancer or cancer cell expresses both TMPRSS4 and SLC34A2.

[0726] In some embodiments, the treatment results in a decrease in the cancer volume or size. In some embodiments, the treatment is effective at reducing a cancer volume as compared to the cancer volume prior to administration of the antibody. In some embodiments, the treatment results in a decrease in the cancer growth rate. In some embodiments, the treatment is effective at reducing a cancer growth rate as compared to the cancer growth rate prior to administration of the antibody. In some embodiments, the treatment is effective at eliminating the cancer. In some embodiments, the treatment is effective at killing the cancer or cancer cells.

[0727] In some embodiments, TMPRSS4 and/or SLC34A2 are expressed at a higher level in the target cell as compared to a non-target cell. In some embodiments, TMPRSS4 and/or SLC34A2 are expressed at a higher level in the cancer cell as compared to a non-cancer cell. Levels of TMPRSS4 and/or SLC34A2 RNA or protein expression can be assessed by any technique known in the field, including, but not limited to, protein assays or nucleic assays such as FACS, Western blot, ELISA, immunoprecipitation, immunohistochemistry, immunofluorescence, radioimmunoassay, dot blotting, immunodetection methods, HPLC, surface plasmon resonance, optical spectroscopy, mass spectrometry, HPLC, qPCR, RT-qPCR, multiplex qPCR or RT-qPCR, RNA-seq, microarray analysis, SAGE, MassARRAY technique, and FISH, and combinations thereof.

### Methods of Immune Modulation and Induced Cytolysis

[0728] Methods of administration of a cell comprising a synthetic immune receptor that specifically binds to TMPRSS4 and/or SLC34A2 or a cell comprising a system comprising a priming receptor that specifically binds to SLC34A2 and a chimeric antigen receptor that specifically binds to TMPRSS4 to modulate an immune response are provided herein. Modulation can be an increase or decrease in an immune response. In some embodiments, modulation is an increase in an immune response. In some embodiments, the immune response is secretion of pro-inflammatory cytokines or chemokines, or T cell-mediated cytotoxicity. In some embodiments, the immune response is inducing a cytolytic response (e.g., T cell-mediated cytotoxicity) in a target cell by a cell expressing the system. In some embodiments, the immune response is killing a target cell by a cell expressing the system.

[0729] In one aspect, provided herein are methods of inducing cytolysis (e.g., via T cell-mediated cytotoxicity) by or killing a target cell by contacting the target cell with a cell comprising a system comprising a priming receptor that specifically binds to SLC34A2 and a chimeric antigen receptor that specifically binds to TMPRSS4, wherein the target cell expresses SLC34A2 and TMPRSS4. In some embodiments, the target cell is a cancer cell. In some embodiments, the contacting happens in vivo in a subject.

[0730] In one aspect, administration of a cell comprising a synthetic immune receptor that specifically binds to TMPRSS4 and/or SLC34A2 or a cell comprising a system comprising a priming receptor that specifically binds to SLC34A2 and a chimeric antigen receptor that specifically binds to TMPRSS4 as described herein can result in induction of pro-inflammatory molecules, such as cytokines or chemokines. Generally, induced pro-inflammatory molecules are present at levels greater than that achieved with isotype control. Such pro-inflammatory molecules in turn result in activation of anti-tumor immunity, including, but not limited to, T cell activation, T cell proliferation, T cell differentiation, M1-like macrophage activation, and NK cell activation. Thus, the administration of a cell comprising a synthetic immune receptor that specifically binds to TMPRSS4 and/or SLC34A2 or a cell comprising a system comprising a priming receptor that specifically binds to SLC34A2 and a chimeric antigen receptor that specifically binds to TMPRSS4 can induce multiple anti-tumor immune mechanisms that lead to tumor destruction or cytolysis of tumor cells.

[0731] In one aspect, administration of a cell comprising a synthetic immune receptor that specifically binds to TMPRSS4 and/or SLC34A2 or a cell comprising a system comprising a priming receptor that specifically binds to SLC34A2 and a chimeric antigen receptor that specifically binds to TMPRSS4 as described herein can result in T cell-mediated cytotoxicity. Generally, cytotoxic T cells kill target cells bearing specific antigen(s), (e.g., such as SLC34A2 and TMPRSS4) and do not kill neighboring cells that do not express the specific antigen(s).

[0732] In one aspect, provided herein are methods of increasing an immune response (e.g., inducing a pro-inflammatory response or T cell-mediated cytotoxicity) in a subject comprising administering to the subject an effective amount of a cell comprising a synthetic immune receptor that specifically binds to TMPRSS4 and/or SLC34A2 or a cell comprising a system comprising a priming receptor that specifically binds to SLC34A2 and a chimeric antigen receptor that specifically binds to TMPRSS4. In some embodiments, the method of increasing an immune response in a subject comprises administering to the subject a cell comprising a synthetic immune receptor that specifically binds to TMPRSS4 and/or SLC34A2 or a cell comprising a system comprising a priming receptor that specifically binds to SLC34A2 and a chimeric antigen receptor that specifically binds to TMPRSS4.

[0733] In some embodiments, the cell is present in a pharmaceutical composition further comprising a pharmaceutically acceptable excipient.

[0734] In any and all aspects of increasing an immune response as described herein, any increase or decrease or alteration of an aspect of characteristic(s) or function(s) is as compared to a cell not comprising a composition comprising a synthetic immune receptor that specifically binds to TMPRSS4 and/or SLC34A2 or a system comprising a priming receptor that specifically binds to SLC34A2 and a chimeric antigen receptor that specifically binds to TMPRSS4.

[0735] Increasing an immune response can be both enhancing an immune response or inducing an immune response. For instance, increasing an immune response encompasses both the start or initiation of an immune response, or ramping up or amplifying an on-going or existing immune response. In some embodiments, the treatment induces an immune response. In some embodiments, the induced immune response is an adaptive immune response. In some embodiments, the induced immune response is an innate immune response. In some embodiments, the treatment enhances an immune response. In some embodiments, the enhanced immune response is an adaptive immune response. In some embodiments, the enhanced immune response is an innate immune response. In some embodiments, the treatment increases an immune response. In some embodiments, the increased immune response is an adaptive immune response. In some embodiments, the increased immune response is an innate immune response. In some embodiments, the immune response is started or initiated by administration of a cell comprising a synthetic immune receptor that specifically binds to TMPRSS4 or a cell comprising a system comprising a priming receptor that specifically binds to SLC34A2 and a chimeric antigen receptor that specifically binds to TMPRSS4. In some embodiments, the immune response is enhanced by administration of a cell comprising a synthetic immune receptor that specifically binds to TMPRSS4 or a cell comprising a system comprising a priming receptor that specifically binds to SLC34A2 and a chimeric antigen receptor that specifically binds to TMPRSS4.

[0736] In one aspect, the present application provides methods of genetically editing a cell with a synthetic immune receptor that specifically binds to TMPRSS4 and/or SLC34A2 or a system comprising a priming receptor that specifically binds to SLC34A2 and a synthetic immune receptor that specifically binds to TMPRSS4. In some embodiments, the cell is further genetically edited to comprise a first nucleic acid sequence at least 15 nucleotides in length complementary to a nucleic acid encoding human Fas Cell Surface Death Receptor (FAS) comprising the sequence set forth in SEQ ID NO: 964, and a second nucleic acid sequence at least 15 nucleotides in length complementary to a nucleic acid encoding human Phosphatase Non-Receptor Type 2 (PTPN2) comprising the sequence set forth in SEQ ID NO: 966; or complementary to a nucleic acid encoding human Transforming Growth factor (TGF)-β Receptor 2 (TGFBR2) comprising the sequence set forth in SEQ ID NO: 965, which results in the modulation of the immune function of the cell. The modulation can be increasing an immune response. In some embodiments, the modulation is an increase in immune function. In some embodiments, the modulation of function leads to the expression of a synthetic immune receptor that specifically binds to TMPRSS4, such as a CAR that specifically binds to TMPRSS4. In some embodiments, the modulation of function leads to the activation of a cell comprising the system.

[0737] In some embodiments, the cell is a natural killer (NK) cell, a T cell, a CD8+ T cell, a CD4+ T cell, a primary T cell, or a T cell progenitor.

[0738] In some embodiments, the modulation of function of the cells comprising the priming receptor and CAR system as described herein leads to an increase in the cells' abilities to stimulate both native and activated T-cells, for example, by increasing cytokine or chemokine secretion by the cells expressing the priming receptor and CAR system. In some embodiments, the modulation of function enhances or increases the cells' ability to produce cytokines, chemokines, CARs, or costimulatory or activating receptors. In some embodiments, the modulation increases the T-cell stimulatory function of the cells expressing the priming receptor and CAR system, including, for example, the cells' abilities to trigger T-cell receptor (TCR) signaling, T-cell proliferation, or T-cell cytokine production.

[0739] In some embodiments, the increased immune response is secretion of cytokines and chemokines. In some embodiments, the priming receptor and CAR system induces increased expression of at least one cytokine or chemokine in a cell as compared to an isotype control cell. In some embodiments, the at least one cytokine or chemokine is selected from the group consisting of: TNFα and IFNγ. In some embodiments, the cytokine or chemokine is TNFα. In some embodiments, the cytokine or chemokine is IFNγ. In some embodiments, the cytokine or chemokine secretion is increased a between bout 1-100-fold 1, 5, 10, 20, 30, 40, 50, 60, 70, 80, 90, 100, 1-10, 10-20, 20-30, 30-40, 40-50, 50-60, 60-70, 70-80, 80-90, or 90-100 fold as compared to an untreated cell or a cell treated with an isotype control antibody. In some embodiments, the chemokine is TNFα and the secretion is increased between about 1-100-fold, 1-fold, 5-fold, 10-fold, 20-fold, 30-fold, 40-fold, 50-fold, 60-fold, 70-fold, 80-fold, 90-fold, 100-fold, 1-10-fold, 10-20-fold, 20-30-fold, 30-40-fold, 40-50-fold, 50-60-fold, 60-70-fold, 70-80-fold, 80-90-fold, or 90-100-fold as compared to an untreated cell or a cell treated with an isotype control antibody. In some embodiments, the cytokine is IFNγ and the secretion is increased between about 1-100-fold, 1-fold, 5-fold, 10-fold, 20-fold, 30-fold, 40-fold, 50-fold, 60-fold, 70-fold, 80-fold, 90-fold, 100-fold, 1-10-fold, 10-20-fold, 20-30-fold, 30-40-fold, 40-50-fold, 50-60-fold, 60-70-fold, 70-80-fold, 80-90-fold, or 90-100-fold as compared to an untreated cell or a cell treated with an isotype control antibody.

[0740] In some embodiments, the enhanced immune response is anti-tumor immune cell recruitment and activation.

[0741] In some embodiments, the cell expressing the priming receptor and CAR system induces a memory immune response as compared to an isotype control cell. In general, a memory immune response is a protective immune response upon a subsequent exposure to pathogens or antigens that the immune system encountered previously. Exemplary memory immune responses include the immune response after infection or vaccination with an antigen. In general, memory immune responses are mediated by lymphocytes such as T cells or B cells. In some embodiments, the memory immune response is a protective immune response to cancer, including cancer cell growth, proliferation, or metastasis. In some embodiments, the memory immune response inhibits, prevents, or reduces cancer cell growth, proliferation, or metastasis.

### Methods of Reducing Gene Expression

[0742] One aspect of the invention provides a method for attenuating expression of a target gene in mammalian cells, comprising introducing into the mammalian cells a recombinant nucleic acid complementary to the target gene mRNA, such as a single-stranded hairpin ribonucleic acid (shRNA), siRNA, dsRNA, or antisense oligonucleotide. In some embodiments, the recombinant nucleic acid complementary to the target gene mRNA is an shRNA. In some embodiments, the shRNA comprises self-complementary sequences of 19 to 100 nucleotides that form a duplex region, which self-complementary sequences hybridize under intracellular conditions to a target gene mRNA transcript. In some embodiments, the shRNA comprises self-complementary sequences of 22 nt. In some embodiments, the shRNA: (i) is a substrate for cleavage by a RNaseIII enzyme to produce a double-stranded RNA product, (ii) does not produce a general sequence-independent killing of the mammalian cells, and (iii) reduces expression of said target gene in a manner dependent on the sequence of said complementary regions. In some embodiments, the target gene is FAS. In some embodiments, the target gene is human FAS. In some embodiments, the target gene is PTPN2. In some embodiments, the target gene is human PTPN2. In some embodiments, the target gene is TGFBR2. In some embodiments, the target gene is human TGFBR2.

[0743] The immune cell comprising the recombinant nucleic acid can have reduced or decreased expression of a target gene selected from the group consisting of FAS, PTPN2, and TGFBR2. In some embodiments, the immune cell has reduced FAS, PTPN2, and/or TGFBR2 expression of between about 50-100%, 50-99%, 50-95%, 50-90%, 50-85%, 50-80%, 50-75%, 50-70%, 50-65%, 50-60%, 50-55%, as compared to a control cell that does not comprise the recombinant nucleic acid molecule(s). In some embodiments, the immune cell has reduced FAS expression in the immune cell by at least 50%, 55%, 60%, 65%, 75%, 80%, 85%, 90%, 95%, or 99% as compared to a control cell that does not comprise the recombinant nucleic acid molecule(s). In some embodiments, the immune cell has reduced PTPN2 expression in the immune cell by at least 50%, 55%, 60%, 65%, 75%, 80%, 85%, 90%, 95%, or 99% as compared to a control cell that does not comprise the recombinant nucleic acid molecule(s). In some embodiments, the immune cell has reduced TGFBR2 expression in the immune cell by at least 50%, 55%, 60%, 65%, 75%, 80%, 85%, 90%, 95%, or 99% as compared to a control cell that does not comprise the recombinant nucleic acid molecule(s).

[0744] In some embodiments, expression of FAS in the immune cell is reduced by at least 50%, 55%, 60%, 65%, 75%, 80%, 85%, 90%, 95%, or 99% as compared to a control cell that does not comprise the first nucleic acid. In some embodiments, the second nucleic acid is capable of reducing expression of PTPN2 in the immune cell by at least 50%, 55%, 60%, 65%, 75%, 80%, 85%, 90%, 95%, or 99% as compared to a control cell that does not comprise the second nucleic acid. In some embodiments, expression of PTPN2 in the immune cell is reduced by at least 50%, 55%, 60%, 65%, 75%, 80%, 85%, 90%, 95%, or 99% as compared to a control cell that does not comprise the second nucleic acid.

[0745] In some embodiments, the second nucleic acid is capable of reducing expression of TGFBR2 in the immune cell by at least 50%, 55%, 60%, 65%, 75%, 80%, 85%, 90%, 95%, or 99% as compared to a control cell that does not comprise the second nucleic acid. In some embodiments, expression of TGFBR2 in the immune cell is reduced by at least 50%, 55%, 60%, 65%, 75%, 80%, 85%, 90%, 95%, or 99% as compared to a control cell that does not comprise the second nucleic acid.

[0746] In some embodiments, expression of FAS, PTPN2, and/or TGFBR2 is determined by a nucleic acid assay or a protein assay. In some embodiments, the nucleic acid assay comprises at least one of polymerase chain reaction (PCR), quantitative PCR (qPCR), RT-qPCR, microarray, gene array, or RNAseq

### Methods of Editing Cells

[0747] Provided herein are methods of inserting nucleotide sequences greater than about 5 kilobases in length into the genome of a cell, in the absence of a viral vector. In some embodiments, the nucleotide sequence greater than about 5 kilobase in length can be inserted into the genome of a primary immune cell, in the absence of a viral vector

[0748] Integration of large nucleic acids, for example nucleic acids greater than 5 kilobase in size, into cells, can be limited by low efficiency of integration, off-target effects and/or loss of cell viability. Described herein are methods and compositions for achieving integration of a nucleotide sequence, for example, a nucleotide sequence greater than about 5 kilobases in size, into the genome of a cell. In some methods the efficiency of integration is increased, off-target effects are reduced and/or loss of cell viability is reduced.

[0749] The plasmid can be introduced into an immune cell with a nuclease, such as a CRISPR-associated system (Cas). The nuclease can be introduced in a ribonucleoprotein format with a guide RNA (gRNA) that targets a specific site on the genome of the immune cell. The nuclease cuts the genomic DNA at this specific site. The specific site may be a portion of the genome that encodes an endogenous immune cell receptor. Thus, cutting the genome at this site will cause the immune cell to no longer express an endogenous immune cell receptor.

[0750] The plasmid may include 5′ and 3′ homology-directed repair arms complementary to sequences at a specific site on the genome of the immune cell. The complementary sequences are on either side of the site cut by the nuclease, which allows the plasmid to be incorporated at a specified insertion site on the immune cell's genome. Once the plasmid is incorporated, the cell will express the priming receptor. However, as explained, the design of the transgene cassette ensures that non-virally delivered circuit system receptors do not express CAR until the priming receptor binds to its cognate ligand and releases the cleavable transcription factor.

[0751] Initially, an immune cell such as a T cell is activated. The immune cell or T cell may be obtained from a patient. Thus, the present disclosure provides methods in which immune cells, such as T cells, are harvested from a patient. Then, the plasmid that encodes the CAR and priming receptor are introduced into the immune cell (e.g., the T cell). Advantageously, the plasmids of the present disclosure can be introduced using electroporation. When introducing the plasmid via electroporation, the nuclease may also be introduced. By using electroporation, methods of the present disclosure avoid the use of viral vectors for introducing transgenes, which is a known bottleneck in immune cell engineering. The immune cells (e.g., the T cells) are then expanded and co-cultured to create a sufficient quantity of engineered immune cells to be used as a therapeutic treatment.

[0752] Methods for editing the genome of a cell can include a) providing a Cas9 ribonucleoprotein complex (RNP)-DNA template complex comprising: (i) the RNP, wherein the RNP comprises a Cas9 nuclease domain and a guide RNA, wherein the guide RNA specifically hybridizes to a target region of the genome of the cell, and wherein the Cas9 nuclease domain cleaves the target region to create an insertion site in the genome of the cell; and (ii) a double-stranded or single-stranded DNA template, wherein the size of the DNA template is greater than about 200 nucleotides, wherein the 5′ and 3′ ends of the DNA template comprise nucleotide sequences that are homologous to genomic sequences flanking the insertion site, and wherein the molar ratio of RNP to DNA template in the complex is from about 3:1 to about 100:1; and b) introducing the RNP-DNA template complex into the cell.

[0753] In some embodiments, the methods described herein provide an efficiency of delivery of the RNP-DNA template complex of at least about 20%, 25%, 30%, 35%, 40%, 45%, 50%, 55%, 60%, 65%, 70%, 75%, 80%, 85%, 90%, 95%, 97.5%, 99%, 99.5%, 99%, or higher. In some cases, the efficiency is determined with respect to cells that are viable after introducing the RNP-DNA template into the cell. In some cases, the efficiency is determined with respect to the total number of cells (viable or non-viable) in which the RNP-DNA template is introduced into the cell.

[0754] As another example, the efficiency of delivery can be determined by quantifying the number of genome edited cells in a population of cells (as compared to total cells or total viable cells obtained after the introducing step). Various methods for quantifying genome editing can be utilized. These methods include, but are not limited to, the use of a mismatch-specific nuclease, such as T7 endonuclease I; sequencing of one or more target loci (e.g., by sanger sequencing of cloned target locus amplification fragments); and high-throughput deep sequencing.

[0755] In some embodiments, loss of cell viability is reduced as compared to loss of cell viability after introduction of naked DNA into a cell or introduction of DNA into a cell using a viral vector. The reduction can be a reduction of at least 10%, 20%, 30%, 40%, 50%, 60%, 70%, 80%, 90%, 100% or any percentage in between these percentages. In some embodiments, off-target effects of integration are reduced as compared to off-target integration after introduction of naked DNA into a cell or introduction of DNA into a cell using a viral vector. The reduction can be a reduction of at least 10%, 20%, 30%, 40%, 50%, 60%, 70%, 80%, 90%, 100% or any percentage in between these percentages.

[0756] In some cases, the methods described herein provide for high cell viability of cells to which the RNP-DNA template has been introduced. In some cases, the viability of the cells to which the RNP-DNA template has been introduced is at least about 20%, 25%, 30%, 35%, 40%, 45%, 50%, 55%, 60%, 65%, 70%, 75%, 80%, 85%, 90%, 95%, 97.5%, 99%, 99.5%, 99%, or higher. In some cases, the viability of the cells to which the RNP-DNA template has been introduced is from about 20% to about 99%, from about 30% to about 90%, from about 35% to about 85% or 90% or higher, from about 40% to about 85% or 90% or higher, from about 50% to about 85% or 90% or higher, from about 50% to about 85% or 90% or higher, from about 60% to about 85% or 90% or higher, or from about 70% to about 85% or 90% or higher.

[0757] In the methods provided herein, the molar ratio of RNP to DNA template can be from about 3:1 to about 100:1. For example, the molar ratio can be from about 5:1 to 10:1, from about 5:1 to about 15:1, 5:1 to about 20:1; 5:1 to about 25:1; from about 8:1 to about 12:1; from about 8:1 to about 15:1, from about 8:1 to about 20:1, or from about 8:1 to about 25:1.

[0758] In some embodiments, the DNA template is at a concentration of about 2.5 pM to about 25 pM. For example, the concentration of DNA template can be about 2.5, 3, 3.5, 4, 4.5, 5, 5.5, 6, 6.5, 7, 7.5, 8, 8.5, 9, 9.5, 10, 10.5, 11, 11.5, 12, 12.5, 13, 13.5, 14, 14.5, 15, 15.5, 16, 16.5, 17, 17.5, 18, 18.5, 19, 19.5, 20, 20.5, 21, 21.5, 22, 22.5, 23, 23.5, 24, 24.5, 25 pM or any concentration in between these concentrations.

[0759] In some embodiments, the size or length of the DNA template is greater than about 4.5 kb, 5.0 kb, 5.1 kb, 5.2 kb, 5.3 kb, 5.4 kb, 5.5 kb, 5.6 kb, 5.7 kb, 5.8 kb, 5.9 kb, 6.0 kb, 6.1 kb, 6.2 kb, 6.3 kb, 6.4 kb, 6.5 kb, 6.6 kb, 6.7 kb, 6.8 kb, 6.9 kb, 7.0 kb, 7.1 kb, 7.2 kb, 7.3 kb, 7.4 kb, 7.5 kb, 7.6 kb, 7.7 kb, 7.8 kb, 7.9 kb, 8.0 kb, 8.1 kb, 8.2 kb, 8.3 kb, 8.4 kb, 8.5 kb, 8.6 kb, 8.7 kb, 8.8 kb, 8.9 kb, 9.0 kb, 9.1 kb, 9.2 kb, 9.3 kb, 9.4 kb, 9.5 kb, 9.6 kb, 9.7 kb, 9.8 kb, 9.9 kb, or 10 kb or any size of DNA template in between these sizes. For example, the size of the DNA template can be about 4.5 kb to about 10 kb, about 5 kb to about 10 kb, about 5 kb to about 9 kb, about 5 kb to about 8 kb, about 5 kb to about 7 kb, about 5 kb to about 6 kb, about kb 6 to about 10 kb, about 6 kb to about 9 kb, about 6 kb to about 8 kb, about 6 kb to about 7 kb, about 7 kb to about 10 kb, about 7 kb to about 9 kb, about 7 kb to about 8 kb, about 8 kb to about 10 kb, about 8 kb to about 9 kb, or about 9 kb to about 10 kb.

[0760] In some embodiments, the amount of DNA template is about 1 μg to about 10 μg. For example, the amount of DNA template can be about 1 μg to about 2 μg, about 1 μg to about 3 μg, about 1 μg to about 4 μg, about 1 μg to about 5 μg, about 1 μg to about 6 μg, about 1 μg to about 7 μg, about 1 μg to about 8 μg, about 1 μg to about 9 μg, about 1 μg to about 10 μg. In some embodiments the amount of DNA template is about 2 μg to about 3 μg, about 2 μg to about 4 μg, about 2 μg to about 5 μg, about 2 μg to about 6 μg, about 2 μg to about 7 μg, about 2 μg to about 8 μg, about 2 μg to about 9 μg, or 2 μg to about 10 μg. In some embodiments the amount of DNA template is about 3 μg to about 4 μg, about 3 μg to about 5 μg, about 3 μg to about 6 μg, about 3 μg to about 7 μg, about 3 μg to about 8 μg, about 3 μg to about 9 μg, or about 3 μg to about 10 μg. In some embodiments, the amount of DNA template is about 4 μg to about 5 μg, about 4 μg to about 6 μg, about 4 μg to about 7 μg, about 4 μg to about 8 μg, about 4 μg to about 9 μg, or about 4 μg to about 10 μg. In some embodiments, the amount of DNA template is about 5 μg to about 6 μg, about 5 μg to about 7 μg, about 5 μg to about 8 μg, about 5 μg to about 9 μg, or about 5 μg to about 10 μg. In some embodiments, the amount of DNA template is about 6 μg to about 7 μg, about 6 μg to about 8 μg, about 6 μg to about 9 μg, or about 6 μg to about 10 μg. In some embodiments, the amount of DNA template is about 7 μg to about 8 μg, about 7 μg to about 9 μg, or about 7 μg to about 10 μg. In some embodiments, the amount of DNA template is about 8 μg to about 9 μg, or about 8 μg to about 10 μg. In some embodiments, the amount of DNA template is about 9 μg to about 10 μg.

[0761] In some cases, the size of the DNA template is large enough and in sufficient quantity to be lethal as naked DNA. In some embodiments, the DNA template encodes a heterologous protein or a fragment thereof. In some embodiments, the DNA template encodes at least one protein or comprises at least one gene. In some embodiments, the DNA template encodes at least two proteins or comprises at least two genes. In some embodiments, the DNA template encodes one, two, three, four, five, six, seven, eight, nine, ten, or more proteins or comprises one, two, three, four, five, six, seven, eight, nine, ten, or more genes.

[0762] In some embodiments, the DNA template includes regulatory sequences, for example, a promoter sequence and/or an enhancer sequence to regulate expression of the heterologous protein or fragment thereof after insertion into the genome of a cell.

[0763] In some cases, the DNA template is a linear DNA template. In some cases, the DNA template is a single-stranded DNA template. In some cases, the single-stranded DNA template is a pure single-stranded DNA template. As used herein, by “pure single-stranded DNA” is meant single-stranded DNA that substantially lacks the other or opposite strand of DNA. By “substantially lacks” is meant that the pure single-stranded DNA lacks at least 100-fold more of one strand than another strand of DNA. In some embodiments, the DNA template comprises a modification at its 5′ and/or 3′ terminus, e.g., to stabilize or protect the DNA template. Exemplary modifications include closed ends, such as closed end DNA (ceDNA) or doggy bone DNA (dbDNA;Touchlight). The template DNA may comprise additional nucleotides between the modification and the 5′ or 3′ end of the DNA template.

[0764] In some cases, the RNP-DNA template complex is formed by incubating the RNP with the DNA template for less than about one minute to about thirty minutes, at a temperature of about 20° C. to about 25° C. For example, the RNP can be incubated with the DNA template for about 5 seconds, 10 seconds, 15 seconds, 20 seconds, 25 seconds, 30 seconds, 35 seconds, 40 seconds, 45 seconds, 50 seconds, 55 seconds, 1 minute, 2 minutes, 3 minutes, 4 minutes, 5 minutes, 6 minutes, 7 minutes, 8 minutes, 9 minutes, 10 minutes, 11 minutes, 12 minutes, 13 minutes, 14 minutes, 15 minutes, 16 minutes, 17 minutes, 18 minutes, 19 minutes, 20 minutes, 21 minutes, 22 minutes, 23 minutes, 24 minutes, 25 minutes, 26 minutes, 27 minutes, 28 minutes, 29 minutes or 30 minutes or any amount of time in between these times, at a temperature of about 20° C., 21° C., 22° C., 23° C., 24° C., or 25° C. In another example, the RNP can be incubated with the DNA template for less than about one minute to about one minute, for less than about one minute to about 5 minutes, for less than about 1 minute to about 10 minutes, for about 5 minutes to 10 minutes, for about 5 minutes to 15 minutes, for about 10 to about 15 minutes, for about 10 minutes to about 20 minutes, or for about 10 minutes to about 30 minutes, at a temperature of about 20° C. to about 25° C. In some embodiments, the RNP-DNA template complex and the cell are mixed prior to introducing the RNP-DNA template complex into the cell.

[0765] In some embodiments introducing the RNP-DNA template complex comprises electroporation. Methods, compositions, and devices for electroporating cells to introduce a RNP-DNA template complex can include those described in the examples herein. Additional or alternative methods, compositions, and devices for electroporating cells to introduce a RNP-DNA template complex can include those described in WO/2006/001614 or Kim, J. A. et al. Biosens. Bioelectron. 23, 1353-1360 (2008). Additional or alternative methods, compositions, and devices for electroporating cells to introduce a RNP-DNA template complex can include those described in U.S. Patent Appl. Pub. Nos. 2006/0094095; 2005/0064596; or 2006/0087522. Additional or alternative methods, compositions, and devices for electroporating cells to introduce a RNP-DNA template complex can include those described in Li, L. H. et al. Cancer Res. Treat. 1, 341-350 (2002); U.S. Pat. Nos. 6,773,669; 7,186,559; 7,771,984; 7,991,559; 6,485,961; 7,029,916; and U.S. Patent Appl. Pub. Nos: 2014/0017213; and 2012/0088842, all of which are hereby incorporated by reference. Additional or alternative methods, compositions, and devices for electroporating cells to introduce a RNP-DNA template complex can include those described in Geng, T. et al., J. Control Release 144, 91-100 (2010); and Wang, J., et al. Lab. Chip 10, 2057-2061 (2010), all of which are hereby incorporated by reference.

[0766] In some embodiments, the Cas9 protein can be in an active endonuclease form, such that when bound to target nucleic acid as part of a complex with a guide RNA or part of a complex with a DNA template, a double strand break is introduced into the target nucleic acid. The double strand break can be repaired by NHEJ to introduce random mutations, or HDR to introduce specific mutations. Various Cas9 nucleases can be utilized in the methods described herein. For example, a Cas9 nuclease that requires an NGG protospacer adjacent motif (PAM) immediately 3′ of the region targeted by the guide RNA can be utilized. Such Cas9 nucleases can be targeted to any region of a genome that contains an NGG sequence. As another example, Cas9 proteins with orthogonal PAM motif requirements can be utilized to target sequences that do not have an adjacent NGG PAM sequence. Exemplary Cas9 proteins with orthogonal PAM sequence specificities include, but are not limited to, CFP1, those described in Nature Methods 10, 1116-1121 (2013), and those described in Zetsche et al., Cell, Volume 163, Issue 3, p759-771, 22 Oct. 2015, both of which are hereby incorporated by reference.

[0767] In some cases, the Cas9 protein is a nickase, such that when bound to target nucleic acid as part of a complex with a guide RNA, a single strand break or nick is introduced into the target nucleic acid. A pair of Cas9 nickases, each bound to a structurally different guide RNA, can be targeted to two proximal sites of a target genomic region and thus introduce a pair of proximal single stranded breaks into the target genomic region. Nickase pairs can provide enhanced specificity because off-target effects are likely to result in single nicks, which are generally repaired without lesion by base-excision repair mechanisms. Exemplary Cas9 nickases include Cas9 nucleases having a D10A or H840A mutation.

[0768] In some embodiments, the RNP comprises a Cas9 nuclease. In some embodiments, the RNP comprises a Cas9 nickase. In some embodiments, the RNP-DNA template complex comprises at least two structurally different RNP complexes. In some embodiments, the at least two structurally different RNP complexes contain structurally different Cas9 nuclease domains In some embodiments, the at least two structurally different RNP complexes contain structurally different guide RNAs. In some embodiments, wherein the at least two structurally different RNP complexes contain structurally different guide RNAs, each of the structurally different RNP complexes comprises a Cas9 nickase, and the structurally different guide RNAs hybridize to opposite strands of the target region.

[0769] In some cases, a plurality of RNP-DNA templates comprising structurally different ribonucleoprotein complexes is introduced into the cell. For example a Cas9 protein can be complexed with a plurality (e.g., 2, 3, 4, 5, or more, e.g., 2-10, 5-100, 20-100) of structurally different guide RNAs to target insertion of a DNA template at a plurality of structurally different target genomic regions.

[0770] In the methods and compositions provided herein, cells include, but are not limited to, eukaryotic cells, prokaryotic cells, animal cells, plant cells, fungal cells and the like. Optionally, the cell is a mammalian cell, for example, a human cell. The cell can be in vitro, ex vivo, or in vivo. The cell can also be a primary cell, a germ cell, a stem cell or a precursor cell. The precursor cell can be, for example, a pluripotent stem cell, or a hematopoietic stem cell. In some embodiments, the cell is a primary hematopoietic cell or a primary hematopoietic stem cell. In some embodiments, the primary hematopoietic cell is an immune cell. In some embodiments, the immune cell is a T cell. In some embodiments, the T cell is a regulatory T cell, an effector T cell, or a naïve T cell. In some embodiments, the T cell is a CD4⁺ T cell. In some embodiments, the T cell is a CD8⁺ T cell. In some embodiments, the T cell is a CD4⁺CD8⁺ T cell. In some embodiments, the T cell is a CD4⁻CD8⁻ T cell. Populations of any of the cells modified by any of the methods described herein are also provided. In some embodiments, the methods further comprise expanding the population of modified cells.

[0771] In some cases, the cells are removed from a subject, modified using any of the methods described herein and administered to the patient. In other cases, any of the constructs described herein is delivered to the patient in vivo. See, for example, U.S. Pat. No. 9,737,604 and Zhang et al. “Lipid nanoparticle-mediated efficient delivery of CRISPR/Cas9 for tumor therapy,” NPG Asia Materials Volume 9, page e441 (2017), both of which are hereby incorporated by reference.

[0772] In some embodiments, the RNP-DNA template complex is introduced into about 1×10⁵ to about 2×10⁶ cells. For example, the RNP-DNA template complex can be introduced into about 1×10⁵ to about 5×10⁵ cells, about 1×10⁵ to about 1×10⁶, 1×10⁵ to about 1.5×10⁶, 1×10⁵ to about 2×10⁶, about 1×10⁶ to about 1.5×10⁶ cells or about 1×10⁶ to about 2×10⁶.

[0773] In some cases, the methods and compositions described herein can be used for generation, modification, use, or control of recombinant T cells, such as chimeric antigen receptor T cells (CAR T cells). Such CAR T cells can be used to treat or prevent cancer, an infectious disease, or autoimmune disease in a subject. For example, in some embodiments, one or more gene products are inserted or knocked-in to a T cell to express a heterologous protein (e.g., a chimeric antigen receptor (CAR) or a priming receptor).

[0774] Genetic engineering (e.g., genome editing, nuclease-mediated editing, CRISPR/Cas9-mediated editing, etc.), engineering expression of heterologous receptors (e.g., CAR and/or TCRs), and RNAi (e.g., antisense RNA, siRNA, microRNA, shRNA, etc.) are described in International Publication Nos. WO2018232356A1, WO2019084552A1, WO2019226998A1, WO2020014235A1, WO2020123871A1, and WO2020186219A1, each of which is herein incorporated by reference for all purposes.

### Insertion Sites

[0775] Methods for editing the genome of a T cell, specifically, include a method of editing the genome of a human T cell comprise inserting a nucleic acid sequence or construct into a target region in exon 1 of the TCR-α subunit (TRAC) gene in the human T cell. In some embodiments, the target region is in exon 1 of the constant domain of TRAC gene. In other embodiments, the target region is in exon 1, exon 2 or exon 3, prior to the start of the sequence encoding the TCR-α transmembrane domain.

[0776] Methods for editing the genome of a T cell also include a method of editing the genome of a human T cell comprise inserting a nucleic acid sequence or construct into a target region in exon 1 of a TCR-β subunit (TRBC) gene in the human T cell. In some embodiments, the target region is in exon 1 of the TRBC1 or TRBC2 gene.

[0777] Methods for editing the genome of a T cell, specifically, include a method of editing the genome of a human T cell comprise inserting a nucleic acid sequence or construct into a target region of a genomic safe harbor (GSH) site.

[0778] Methods for editing the genome of a T cell also include a method of editing the genome of a human T cell comprise inserting a nucleic acid sequence or construct into a GS94 target region (locus chr11: 128340000-128350000).

[0779] In some embodiments, the target region is target region is the GS94 locus.

[0780] Gene editing therapies include, for example, vector integration and site specific integration. Site-specific integration is a promising alternative to random integration of viral vectors, as it mitigates the risks of insertional mutagenesis or insertional oncogenesis (Kolb et al. Trends Biotechnol. 2005 23:399-406; Porteus et al. Nat Biotechnol. 2005 23:967-973; Paques et al. Curr Gen Ther. 2007 7:49-66). However, site specific integration continues to face challenges such as poor knock-in efficiency, risk of insertional oncogenesis, unstable and/or anomalous expression of adjacent genes or the transgene, low accessibility (e.g., within 20 kB of adjacent genes), etc., These challenges can be addressed, in part, through the identification and use of safe harbor loci or safe harbor sites (SHS), which are sites in which genes or genetic elements can be incorporated without disruption to expression or regulation of adjacent genes.

[0781] The most widely used of the putative human safe harbor sites is the AAVS1 site on chromosome 19q, which was initially identified as a site for recurrent adenoassociated virus insertion. Other potential SHS have been identified on the basis of homology, with sites first identified in other species (e.g., the human homolog of the permissive murine Rosa26 locus) or among the growing number of human genes that appear non-essential under some circumstances. One putative SHS of this type is the CCR5 chemokine receptor gene, which, when disrupted, confers resistance to human immunodeficiency virus infection. Additional potential genomic SHS have been identified in human and other cell types on the basis of viral integration site mapping or gene-trap analyses, as was the original murine Rosa26 locus. The three top SHS, AAVS1, CCR5, and Rosa26, are in close proximity to many protein coding genes and regulatory elements. (See Sadelain, M., et al. (2012). Safe harbours for the integration of new DNA in the human genome. Nature reviews Cancer, 12 (1), 51-58, the relevant disclosures of which are herein incorporated by reference in their entirety).

[0782] The AAVS1 (also known as the PPP1R12C locus) on human chromosome 19 is a known SHS for hosting transgenes (e.g., DNA transgenes) with expected function. It is at position 19q13.42. It has an open chromatin structure and is transcription-competent. The canonical SHS locus for AAVS1 is chr19: 55,625,241-55,629,351. See Pellenz et al. “New Human Chromosomal Sites with “Safe Harbor” Potential for Targeted Transgene Insertion.” Human gene therapy vol. 30, 7 (2019): 814-828, the relevant disclosures of which are herein incorporated by reference. An exemplary AAVS1 target gRNA and target sequence are provided below:

AAVS1-gRNA sequence:
(SEQ ID NO: 837)
ggggccactagggacaggatGTTTTAGAGCTAGAAATAGCAAGTTAAAA
TAAGGCTAGTCCGTTATCAACTTGAAAAAGTGGCACCGAGTCGGTGCTT
TTTTT
AAVS1 target sequence:
(SEQ ID NO: 838)
ggggccactagggacaggat

[0783] CCR5, which is located on chromosome 3 at position 3p21.31, encodes the major co-receptor for HIV-1. Disruption at this site in the CCR5 gene has been beneficial in HIV/AIDS therapy and prompted the development of zinc-finger nucleases that target its third exon. The canonical SHS locus for CCR5 is chr3: 46,414,443-46,414,942. See Pellenz et al. “New Human Chromosomal Sites with “Safe Harbor” Potential for Targeted Transgene Insertion.” Human gene therapy vol. 30, 7 (2019): 814-828, the relevant disclosures of which are herein incorporated by reference.

[0784] The mouse Rosa26 locus is particularly useful for genetic modification as it can be targeted with high efficiency and is expressed in most cell types tested. Irion et al. 2007 (“Identification and targeting of the ROSA26 locus in human embryonic stem cells.” Nature biotechnology 25.12 (2007): 1477-1482, the relevant disclosure of which are herein incorporated by reference) identified the human homolog, human ROSA26, in chromosome 3 (position 3p25.3). The canonical SHS locus for human Rosa26 (hRosa26) is chr3: 9,415,082-9,414,043. See Pellenz et al. “New Human Chromosomal Sites with “Safe Harbor” Potential for Targeted Transgene Insertion.” Human gene therapy vol. 30, 7 (2019): 814-828, the relevant disclosures of which are herein incorporated by reference.

[0785] Additional examples of safe harbor sites are provided in Pellenz et al. “New Human Chromosomal Sites with “Safe Harbor” Potential for Targeted Transgene Insertion.” Human gene therapy vol. 30, 7 (2019): 814-828, the relevant disclosures of which are herein incorporated by reference. Examples of additional integration sites are provided in Table 9.

[0786] In some embodiments, the safe harbor sites allow for high transgene expression (sufficient to allow for transgene functionality or treatment of a disease of interest) and stable expression of the transgene over several days, weeks or months. In some embodiments, knockout of the gene at the safe harbor locus confers benefit to the function of the cell, or the gene at the safe harbor locus has no known function within the cell. In some embodiments the safe harbor locus results in stable transgene expression in vitro with or without CD3/CD28 stimulation, negligible off-target cleavage as detected by iGuide-Seq or CRISPR-Seq, less off-target cleavage relative to other loci as detected by iGuide-Seq or CRISPR-Seq, negligible transgene-independent cytotoxicity, negligible transgene-independent cytokine expression, negligible transgene-independent chimeric antigen receptor expression, negligible deregulation or silencing of nearby genes, and positioned outside of a cancer-related gene.

[0787] As used, a “nearby gene” can refer to a gene that is within about 100 kilobases (kb), about 125 kb, about 150 kb, about 175 kb, about 200 kb, about 225 kb, about 250 kb, about 275 kb, about 300 kb, about 325 kb, about 350 kb, about 375 kb, about 400 kb, about 425 kb, about 450 kb, about 475 kb, about 500 kb, about 525 kb, about 550 kb away from the safe harbor locus (integration site).

[0788] In some embodiments, the present disclosure contemplates inserts that comprise one or more transgenes. The transgene can encode a therapeutic protein, an antibody, a peptide, or any other gene of interest. The transgene integration can result in, for example, enhanced therapeutic properties. These enhanced therapeutic properties, as used herein, refer to an enhanced therapeutic property of a cell when compared to a typical immune cell of the same normal cell type. For example, a T cell having “enhanced therapeutic properties” has an enhanced, improved, and/or increased treatment outcome when compared to a typical, unmodified and/or naturally occurring T cell. The therapeutic properties of immune cells can include, but are not limited to, cell transplantation, transport, homing, viability, self-renewal, persistence, immune response control and regulation, survival, and cytotoxicity. The therapeutic properties of immune cells are also manifested by: antigen-targeted receptor expression; HLA presentation or lack thereof; tolerance to the intratumoral microenvironment; induction of bystander immune cells and immune regulation; improved target specificity with reduction; resistance to treatments such as chemotherapy.

[0789] As used herein, the term “insert size” refers to the length of the nucleotide sequence being integrated (inserted) at the target locus or safe harbor site. In some embodiments, the insert size comprises at least about 4.5 kb to about 10 kb. In some embodiments, the insert size comprises about 5000 nucleotides or more basepairs. In some embodiments, the insert size comprises up to 4.5, 4.8, 5, 6, 7, 8, 9, 10, 11, 12, 13, 14, 15, 16, 17, 18, 19, 20 kb or the sizes in between. In some embodiments, the insert size is greater than 4.5, 4.8, 5, 6, 7, 8, 9, 10, 11, 12, 13, 14, 15, 16, 17, 18, 19, 20 kb or the sizes in between. In some embodiments, the insert size is within the range of 4.5-15 kb or is any number in that range. In some embodiments, the insert size is within the range of 4.8-8.3 kb or is any number in that range. In some embodiments, the insert size is within the range of 5-8.3 kb or is any number in that range. In some embodiments, the insert size is within the range of 5-15 kb or is any number in that range. In some embodiments, the insert size is within the range of 4.5-20 kb or is any number in that range. In some embodiments, the insert size is 5-10 kb. In some embodiments, the insert size is 4.5-10, 5-10, 6-10, 7-10, 8-10, 9-10 kb. In some embodiments, the insert size is 4.5-11, 6-11, 7-11, 8-11, 9-11, or 10-11 kb. In some embodiments, the insert size is 4.5-12, 6-12, 7-12, 8-12, 9-12, 10-12, or 11-12 kb. In some embodiments, the insert size is 4.5-13, 6-13, 7-13, 8-13, 9-13, 10-13, 11-13, or 12-13 kb. In some embodiments, the insert size is 4.5-14, 6-14, 7-14, 8-14, 9-14, 10-14, 11-14, 12-14 or 13-14 kb. In some embodiments, the insert size is 4.5-15, 6-15, 7-15, 8-15, 9-15, 10-15, 11-15, 12-15, 13-15, or 14-15 kb. In some embodiments, the insert size is 4.5-16, 6-16, 7-16, 8-16, 9-16, 10-16, 11-16, 12-16, 13-16, 14-16 or 15-16 kb. In some embodiments, the insert size is 4.5-17, 6-17, 7-17, 8-17, 9-17, 10-17, 11-17, 12-17, 13-17, or 14-17, 15-17 or 16-17 kb. In some embodiments, the insert size is 4.5-18, 6-18, 7-18, 8-18, 9-18, 10-18, 11-18, 12-18, 13-18, 14-18, 15-18, 16-18 or 17-18 kb. In some embodiments, the insert size is 4.5-19, 6-19, 7-19, 8-19, 9-19, 10-19, 11-19, 12-19, 13-19, 14-19, 15-19, 16-19, 17-19, or 18-19 kb. In some embodiments, the insert size is 4.5-20, 6-20, 7-20, 8-20, 9-20, 10-20, 11-20, 12-20, 13-20, 14-20, 15-20, 16-20, 17-20, 18-20, or 19-20 kb.

[0790] The inserts of the present disclosure refer to nucleic acid molecules or polynucleotide inserted at a target locus or safe harbor site. In some embodiments, the nucleotide sequence is a DNA molecule, e.g., genomic DNA, or comprises deoxy-ribonucleotides. In some embodiments, the insert comprises a smaller fragment of DNA, such as a plastid DNA, mitochondrial DNA, or DNA isolated in the form of a plasmid, a fosmid, a cosmid, a bacterial artificial chromosome (BAC), a yeast artificial chromosome (YAC), and/or any other sub-genome segment of DNA. In some embodiments, the insert is an RNA molecule or comprises ribonucleotides. The nucleotides in the insert are contemplated as naturally occurring nucleotides, non-naturally occurring, and modified nucleotides. Nucleotides may be modified chemically or biochemically, or may contain non-natural or derivatized nucleotide bases, as will be readily appreciated by those of skill in the art. Such modifications include, for example, labels, methylation, substitution of one or more of the naturally occurring nucleotides with an analog, internucleotide modifications. The polynucleotides can be in any topological conformation, including single-stranded, double-stranded, partially duplexed, triplexed, hairpinned, circular conformations, and other three-dimension conformations contemplated in the art.

[0791] The inserts can have coding and/or non-coding regions. The insert can comprises a non-coding sequence (e.g., control elements, e.g., a promoter sequence). In some embodiments, the insert encodes transcription factors. In some embodiments, the insert encodes an antigen binding receptors such as single receptors, T-cell receptors (TCRs), priming receptors, CARs, mAbs, etc. In some embodiments, the insert is a human sequence. In some embodiments, the insert is chimeric. In some embodiments, the insert is a multi-gene/multi-module therapeutic cassette. A multi-gene/multi-module therapeutic cassette refers to an insert or cassette having one or more than one receptor (e.g., synthetic receptors), other exogenous protein coding sequences, non-coding RNAs, transcriptional regulatory elements, and/or insulator sequences, etc.

[0792] In some embodiments, the nucleic acid sequence is inserted into the genome of the T cell via non-viral delivery. In non-viral delivery methods, the nucleic acid can be naked DNA, or in a non-viral plasmid or vector. Non-viral delivery techniques can be site-specific integration techniques, as described herein or known to those of ordinary skill in the art. Examples of site-specific techniques for integration into the safe harbor loci include, without limitation, homology-dependent engineering using nucleases and homology independent targeted insertion using Cas9 or other CRISPR endonucleases.

[0793] In some embodiments, the insert is integrated at a safe harbor site by introducing into the engineered cell, (a) a targeted nuclease that cleaves a target region in the safe harbor site to create the insertion site; and (b) the nucleic acid sequence (insert), wherein the insert is incorporated at the insertion site by, e.g., HDR. Examples of non-viral delivery techniques that can be used in the methods of the present disclosure are provided in U.S. application Ser. Nos. 16/568,116 and 16/622,843, the relevant disclosures of which are herein incorporated by reference in their entirety. In some embodiments, the genomic safe harbor is the GS94 target region (chr11: 128340000-128350000). In some embodiments, the genomic safe harbor is the GS102 target region (chr15: 92830000-92840000).

[0794] Examples of integration sites contemplated are provided in Table 22. In some embodiments, an integration site comprises any site and/or sgRNA selected from Table 22.

TABLE 22
sgRNA sequences

| | SEQ | | | | |
|---|---|---|---|---|---|
| | ID | | sgRNA start coor | sgRNA | Integration |
| sgRNA ID | NO: | sgRNA Sequence | GRCH38 | Target Loci | Site |
| sgRNA_1 | 839 | GCACCTGAATACCACGCCTG | chr16:88811818 | APRT | APRT |
| sgRNA_2 | 840 | CGCCTGCGATGTAGTCGATG | chr16:88811551 | APRT | APRT |
| sgRNA_3 | 841 | CAGGACGGGCGAGATGTCCC | chr16:88811640 | APRT | APRT |
| sgRNA_4 | 842 | CTGAATCTTTGGAGTACCTG | chr15:44715425 | B2M | B2M |
| sgRNA_5 | 843 | GGCCACGGAGCGAGACATCT | chr15:44711550 | B2M | B2M |
| sgRNA_6 | 844 | AAGTCAACTTCAATGTCGGA | chr15:44715515 | B2M | B2M |
| sgRNA_7 | 845 | GCTTGGAGGCCTGATCAGCG | chr19:36141111 | CAPNS1 | CAPNS1 |
| sgRNA_8 | 846 | CTTATCTCTTCGCAGCGAGG | chr19:36142301 | CAPNS1 | CAPNS1 |
| sgRNA_9 | 847 | CACACATTACTCCAACATTG | chr19:36142676 | CAPNS1 | CAPNS1 |
| sgRNA_10 | 848 | TTCCGCAAAATAGAGCCCCA | chr3:105746019 | CBLB | CBLB |
| sgRNA_11 | 849 | TGCACAGAACTATCGTACCA | chr3:105751622 | CBLB | CBLB |
| sgRNA_12 | 850 | GCAATAAGACTCTTTAAAGA | chr3:105853470 | CBLB | CBLB |
| sgRNA_13 | 851 | CAAAGAGATTACGAATGCCT | chr1:116754658 | CD2 | CD2 |
| sgRNA_14 | 852 | CAAGGCACCCCAGGTTTCCA | chr1:116754663 | CD2 | CD2 |
| sgRNA_15 | 853 | TTACGAATGCCTTGGAAACC | chr1:116754666 | CD2 | CD2 |
| sgRNA_16 | 854 | CAGAGACGCATCTGACCCTC | chr11:118315540 | CD3E | CD3E |
| sgRNA_17 | 855 | CATGCAGTTCTCACACACTG | chr11:118313715 | CD3E | CD3E |
| sgRNA_18 | 856 | GTGTGAGAACTGCATGGAGA | chr11:118313715 | CD3E | CD3E |
| sgRNA_19 | 857 | TCTCATTTCAGGAAACCACT | chr11:118349748 | CD3G | CD3G |
| sgRNA_20 | 858 | AGTCATACACCTTAACCAAG | chr11:118349754 | CD3G | CD3G |
| sgRNA_21 | 859 | TTCAAGGAAACCAGTTGAGG | chr11:118352458 | CD3G | CD3G |
| sgRNA_22 | 860 | GAGCCTTGCCTGGAAATCTG | chr11:61118177 | CD5 | CD5 |
| sgRNA_23 | 861 | AAGCGTCAAAAGTCTGCCAG | chr11:61118324 | CD5 | CD5 |
| sgRNA_24 | 862 | CGTTCCAACTCGAAGTGCCA | chr11:61118121 | CD5 | CD5 |
| sgRNA_25 | 863 | GAGCGACTGGGACACGGTGA | chr9:136866246 | EDF1 | EDF1 |
| sgRNA_26 | 864 | GCTGCGCAAGAAGGGCCCTA | chr9:136866211 | EDF1 | EDF1 |
| sgRNA_27 | 865 | TTGTTCTGGCCAGCAGCCCC | chr9:136863433 | EDF1 | EDF1 |
| sgRNA_28 | 866 | CTTCCAGAGCCACATCATCG | chr19:48965791 | FTL | FTL |
| sgRNA_29 | 867 | GGGACTCACCAGAGAGAGGT | chr19:48965601 | FTL | FTL |
| sgRNA_30 | 868 | CGGTCGAAATAGAAGCCCTA | chr19:48965770 | FTL | FTL |
| sgRNA_31 | 869 | AAAAGGATATTGTGCAACTG | chr10:87933015 | PTEN | PTEN |
| sgRNA_32 | 870 | TGTGCATATTTATTACATCG | chr10:87933183 | PTEN | PTEN |
| sgRNA_33 | 871 | TTTGTGAAGATCTTGACCAA | chr10:87933087 | PTEN | PTEN |
| sgRNA_34 | 872 | TGTCATGCTGAACCGCATTG | chr18:12830972 | PTPN2 | PTPN2 |
| sgRNA_35 | 873 | CCACTCTATGAGGATAGTCA | chr18:12859219 | PTPN2 | PTPN2 |
| sgRNA_36 | 874 | TTGACATAGAAGAGGCACAA | chr18:12836828 | PTPN2 | PTPN2 |
| sgRNA_37 | 875 | GAGTACTACACTCAGCAGCA | chr12:6952098 | PTPN6 | PTPN6 |
| sgRNA_38 | 876 | TCACGCACAAGAAACGTCCA | chr12:6954872 | PTPN6 | PTPN6 |
| sgRNA_39 | 877 | AGGTCTCGGTGAAACCACCT | chr12:6951610 | PTPN6 | PTPN6 |
| sgRNA_40 | 878 | AGCATTATCCAAAGAGTCCG | chr1:198696873 | PTPRC | PTPRC |
| sgRNA_41 | 879 | ATATTAATTCTTACCAGTGG | chr1:198692370 | PTPRC | PTPRC |
| sgRNA_42 | 880 | AGCTTTAAATCAAGGTTCAT | chr1:198756176 | PTPRC | PTPRC |
| sgRNA_43 | 881 | ATCCCGAGCCCTAAGGTGCA | chr11:67436325 | PTPRCAP | PTPRCAP |
| sgRNA_44 | 882 | GGCAGCGCGGAGGACAGCGT | chr11:67436285 | PTPRCAP | PTPRCAP |
| sgRNA_45 | 883 | CTCAGGGGGCTACTACCACC | chr11:67436170 | PTPRCAP | PTPRCAP |
| sgRNA_46 | 884 | GTCACCGACGAGACCAGAAG | chr5:82277810 | RPS23 | RPS23 |
| sgRNA_47 | 885 | GTCGTGGACTTCGTACTGCT | chr5:82277843 | RPS23 | RPS23 |
| sgRNA_48 | 886 | TAATTTTTAGGCAAGTGTCG | chr5:82277860 | RPS23 | RPS23 |
| sgRNA_49 | 887 | TTAGCTGTTAGACTTGAATA | chr14:51993810 | RTRAF | RTRAF |
| sgRNA_50 | 888 | CGAGAGCCGTCAACTTGCGT | chr14:51989652 | RTRAF | RTRAF |
| sgRNA_51 | 889 | CGGCTTCAACTGCAAAGGTG | chr14:51989700 | RTRAF | RTRAF |
| sgRNA_52 | 890 | TATGAAAAAGCAGAGCGACT | chr15:43793025 | SERF2 | SERF2 |
| sgRNA_53 | 891 | TCTGGCGGGCGAGCTCACGC | chr15:43792989 | SERF2 | SERF2 |
| sgRNA_54 | 892 | CTCACGCTGGTTACCGCCTA | chr15:43792977 | SERF2 | SERF2 |
| sgRNA_55 | 893 | AAAGATTACGAACTTCCCTG | chr12:46207559 | SLC38A1 | SLC38A1 |
| sgRNA_56 | 894 | GTTAAAAACAGACATGCCTA | chr12:46229232 | SLC38A1 | SLC38A1 |
| sgRNA_57 | 895 | ATGCCTAAGGAGGTTGTACC | chr12:46229246 | SLC38A1 | SLC38A1 |
| sgRNA_58 | 896 | CTCCAGGTATCCCATCGAAA | chr18:47869418 | SMAD2 | SMAD2 |
| sgRNA_59 | 897 | CACCAAATACGATAGATCAG | chr18:47870532 | SMAD2 | SMAD2 |
| sgRNA_60 | 898 | TGGCGGCGTGAATGGCAAGA | chr18:47896729 | SMAD2 | SMAD2 |
| sgRNA_61 | 899 | TAGGATGGTAGCACACAACC | chr16:11255478 | SOCS1 | SOCS1 |
| sgRNA_62 | 900 | CAGCAGCAGAGCCCCGACGG | chr16:11255432 | SOCS1 | SOCS1 |
| sgRNA_63 | 901 | CGGCGTGCGAACGGAATGTG | chr16:11255296 | SOCS1 | SOCS1 |
| sgRNA_64 | 902 | TATAGACGCTGCCCGACGTC | chr15:40038895 | SRP14 | SRP14 |
| sgRNA_65 | 903 | TCCAAAGAAGGGTACTGTGG | chr15:40038368 | SRP14 | SRP14 |
| sgRNA_66 | 904 | ACAGTACCCTTCTTTGGAAT | chr15:40038358 | SRP14 | SRP14 |
| sgRNA_67 | 905 | GCGACGGGCGCATCTACGTG | chr12:120469572 | SRSF9 | SRSF9 |
| sgRNA_68 | 906 | CCCGACCTCCATAAGTCCTG | chr12:120465700 | SRSF9 | SRSF9 |
| sgRNA_69 | 907 | GGGGTCCTCGAAGCGCACGA | chr12:120469426 | SRSF9 | SRSF9 |
| sgRNA_70 | 908 | TGCTCTGTTTAGAAGATGAC | chr5:32591641 | SUB1 | SUB1 |
| sgRNA_71 | 909 | ATATTCTTTTCTAGTTAAAG | chr5:32591566 | SUB1 | SUB1 |
| sgRNA_72 | 910 | CCTGTAAAGAAACAAAAGAC | chr5:32591614 | SUB1 | SUB1 |
| sgRNA_73 | 911 | TGGAGAAAGACGTAACTTCG | chr4:105234315 | TET2 | TET2 |
| sgRNA_74 | 912 | TCTGCCCTGAGGTATGCGAT | chr4:105234747 | TET2 | TET2 |
| sgRNA_75 | 913 | ATTCCGCTTGGTGAAAACGA | chr4:105235656 | TET2 | TET2 |
| sgRNA_76 | 914 | CAGGCACAATAGAAACAACG | chr3:114295571 | TIGIT | TIGIT |
| sgRNA_77 | 915 | CCATTTGTAATGCTGACTTG | chr3:114295700 | TIGIT | TIGIT |
| sgRNA_78 | 916 | CTGGGTCACTTGTGCCGTGG | chr3:114295634 | TIGIT | TIGIT |
| sgRNA_79 | 917 | GTCAGGGTTCTGGATATCTG | chr14:22547508 | TRAC | TRAC |
| sgRNA_80 | 918 | TGGATTTAGAGTCTCTCAGC | chr14:22547541 | TRAC | TRAC |
| sgRNA_81 | 919 | CTGCGGCTGTGGTCCAGCTG | chr14:22550661 | TRAC | TRAC |
| sgRNA_82 | 920 | ACAAAACTGTGCTAGACATG | chr14:22547658 | TRAC | TRAC |
| sgRNA_83 | 921 | TTCTTCCCCAGCCCAGGTAA | chr14:22547778 | TRAC | TRAC |
| sgRNA_84 | 922 | CGTCATGAGCAGATTAAACC | chr14:22550625 | TRAC | TRAC |
| sgRNA_85 | 923 | GAGAGCGCCTGCGACCCGAG | chr19:58544980 | TRIM28 | TRIM28 |
| sgRNA_86 | 924 | CCAGCGGGTGAAGTACACCA | chr19:58544869 | TRIM28 | TRIM28 |
| sgRNA_87 | 925 | GGAGCGCTTTTCGCCGCCAG | chr19:58544839 | TRIM28 | TRIM28 |
| sgRNA_88 | 926 | TGAGGCCTGGACCTTATGCA | chr10:33134193 | chr10:33130000- | desert_1 |
| | | | | 33140000 | (GS88) |
| sgRNA_89 | 927 | CCTGGTGGAGTGAACCATGA | chr10:33132917 | chr10:33130000- | desert_1 |
| | | | | 33140000 | (GS89) |
| sgRNA_90 | 928 | CAAGCACTTAGGTTCCCCTG | chr10:33134633 | chr10:33130000- | desert_1 |
| | | | | 33140000 | (GS90) |
| sgRNA_91 | 929 | GGTCTCCCTACAATTCAGCG | chr10:72294568 | chr10:72290000- | desert_2 |
| | | | | 72300000 | (GS91) |
| sgRNA_92 | 930 | CACAGCGCGTGACTGCAATG | chr10:72298268 | chr10:72290000- | desert_2 |
| | | | | 72300000 | (GS92) |
| sgRNA_93 | 931 | TCTGGGGCACCAATTCTAGG | chr10:72292786 | chr10:72290000- | desert_2 |
| | | | | 72300000 | (GS93) |
| sgRNA_94 | 932 | GAGCCATGCTTGGCTTACGA | chr11:128342576 | chr11:128340000- | desert_3 |
| | | | | 128350000 | (GS94) |
| sgRNA_95 | 933 | GTACAAGTACTTATCTCATG | chr11:128343592 | chr11:128340000- | desert_3 |
| | | | | 128350000 | (GS95) |
| sgRNA_96 | 934 | GAGATAACAACATAACAACA | chr11:128347170 | chr11:128340000- | desert_3 |
| | | | | 128350000 | (GS96) |
| sgRNA_97 | 935 | CATATTCCATAGTCTTTGGG | chr11:65425000 | chr11:65425000- | desert_4 |
| | | | | 65427000 | (GS97) |
| | | | | (NEAT1) | |
| sgRNA_98 | 936 | CTGCCCCTTAGCAACTTAGG | chr11:65425507 | chr11:65425000- | desert_4 |
| | | | | 65427000 | (GS98) |
| | | | | (NEAT1) | |
| sgRNA_99 | 937 | TGTTTAAAAATATGTTGACA | chr11:65426264 | chr11:65425000- | desert_4 |
| | | | | 65427000 | (GS99) |
| | | | | (NEAT1) | |
| sgRNA_100 | 938 | CCAGGAATGGAAACTCACGC | chr15:92830315 | chr15:92830000- | desert_5 |
| | | | | 92840000 | (GS100) |
| sgRNA_101 | 939 | GAGGCCGCTGAATTAACCCG | chr15:92831850 | chr15:92830000- | desert_5 |
| | | | | 92840000 | (GS101) |
| sgRNA_102 | 940 | ATACACGCACACTTGCAGAA | chr15:92831131 | chr15:92830000- | desert_5 |
| | | | | 92840000 | (GS102) |
| sgRNA_103 | 941 | GAGCAGACAGAAACCCAGGG | chr16:11225670 | chr16:11220000- | desert_6 |
| | | | | 11230000 | (GS103) |
| sgRNA_104 | 942 | TGAGTCTCCAAACAGAACAG | chr16:11226284 | chr16:11220000- | desert_6 |
| | | | | 11230000 | (GS104) |
| sgRNA_105 | 943 | TAATATCACTGACTTCACGG | chr16:11225029 | chr16:11220000- | desert_6 |
| | | | | 11230000 | (GS105) |
| sgRNA_106 | 944 | TACACACAATGTAAGCAGCA | chr2:87467461 | chr2:87460000- | desert_7 |
| | | | | 87470000 | (GS106) |
| sgRNA_107 | 945 | GGGAGCTCAATTCGAAACCA | chr2:87468809 | chr2:87460000- | desert_7 |
| | | | | 87470000 | (GS107) |
| sgRNA_108 | 946 | TTGGACAGGTGAGACAGTCG | chr2:87467001 | chr2:87460000- | desert_7 |
| | | | | 87470000 | (GS108) |
| sgRNA_109 | 947 | AAGCTCACTCAGATAGTGTG | chr3:186511316 | chr3:186510000- | desert_8 |
| | | | | 186520000 | (GS109) |
| sgRNA_110 | 948 | CAGGAGAACCACCTTACACG | chr3:186515260 | chr3:186510000- | desert_8 |
| | | | | 186520000 | (GS110) |
| sgRNA_111 | 949 | GGACAGACCCTGATTCACAA | chr3:186519655 | chr3:186510000- | desert_8 |
| | | | | 186520000 | (GS111) |
| sgRNA_112 | 950 | ACATGGCAGTCTATGAACAG | chr3:59451154 | chr3:59450000- | desert_9 |
| | | | | 59460000 | (GS112) |
| sgRNA_113 | 951 | CCTATAGAGAGTACTACTTG | chr3:59456416 | chr3:59450000- | desert_9 |
| | | | | 59460000 | (GS113) |
| sgRNA_114 | 952 | CCAACCGGGTCTTCATTACG | chr3:59457029 | chr3:59450000- | desert_9 |
| | | | | 59460000 | (GS114) |
| sgRNA_115 | 953 | TCAAGCGTAGAGTTCCGAGT | chr8:127993006 | chr8:127980000- | desert_10 |
| | | | | 128000000 | (GS115) |
| sgRNA_116 | 954 | TCATGCAATTATGGACCCAG | chr8:127994663 | chr8:127980000- | desert_10 |
| | | | | 128000000 | (GS116) |
| sgRNA_117 | 955 | CGGGAAAGTGACTGGCCATG | chr8:127996766 | chr8:127980000- | desert_10 |
| | | | | 128000000 | (GS117) |
| sgRNA_118 | 956 | TGAGATTGAAATCAAATCGG | chr9:7974159 | chr9:7970000- | desert_11 |
| | | | | 7980000 | (GS118) |
| sgRNA_119 | 957 | TATGCAATATTCATCACGCG | chr9:7977914 | chr9:7970000- | desert_11 |
| | | | | 7980000 | (GS119) |
| sgRNA_120 | 958 | AATGTGTTAAATCAAATGCA | chr9:7976895 | chr9:7970000- | desert_11 |
| | | | | 7980000 | (GS120) |

### CRISPR-Cas Editing

[0795] One effective example of gene editing is the CRISPR-Cas approach (e.g., CRISPR-Cas9). This approach incorporates the use of a guide polynucleotide (e.g., guide ribonucleic acid or gRNA) and a Cas endonuclease (e.g., Cas9 endonuclease).

[0796] The guide polynucleotide includes a first nucleotide sequence domain (also referred to as a variable targeting domain or VT domain) that is complementary to a nucleotide sequence in the target DNA, and a second nucleotide that interacts with a Cas endonuclease polypeptide. It can be a double molecule (also referred to as a double-stranded guide polynucleotide) comprising a sequence domain (referred to as a Cas endonuclease recognition domain or CER domain). The CER domain of this double molecule guide polynucleotide comprises two separate molecules that hybridize along the complementary region. The two separate molecules can be RNA sequences, DNA sequences and/or RNA-DNA combination sequences.

[0797] Genome editing using CRISPR-Cas approaches relies on the repair of site-specific DNA double-strand breaks (DSBs) induced by the RNA-guided Cas endonuclease (e.g., Cas 9 endonuclease). Homology-directed repair (HDR) of these DSBs enables precise editing of the genome by introducing defined genomic changes, including base substitutions, sequence insertions, and deletions. Conventional HDR-based CRISPR/Cas9 genome-editing involves transfecting cells with Cas9, gRNA and donor DNA containing homologous arms matching the genomic locus of interest.

[0798] HITI (homology independent targeted insertion) uses a non-homologous end joining (NHEJ)-based homology-independent strategy and the method can be more efficient than HDR. Guide RNAs (gRNAs) target the insertion site. For HITI, donor plasmids lack homology arms and DSB repair does not occur through the HDR pathway. The donor polynucleotide construct can be engineered to include Cas9 cleavage site(s) flanking the gene or sequence to be inserted. This results in Cas9 cleavage at both the donor plasmid and the genomic target sequence. Both target and donor have blunt ends and the linearized donor DNA plasmid is used by the NHEJ pathway resulting integration into the genomic DSB site. (See, for example, Suzuki, K., et al. (2016). In vivo genome editing via CRISPR/Cas9 mediated homology-independent targeted integration. Nature, 540 (7631), 144-149, the relevant disclosures of which are herein incorporated in their entirety).

[0799] Methods for conducing gene editing using CRISPR-Cas approaches are known to those of ordinary skill in the art. (See, for example, US Application Nos. U.S. Ser. No. 16/312,676, U.S. Ser. No. 15/303,722, and U.S. Ser. No. 15/628,533, the disclosures of which are hereby incorporated by reference in their entireties). Additionally, uses of endonucleases for inserting transgenes into safe harbor loci are described, for example, in U.S. Ser. No. 13/036,343, the disclosure of which is herein incorporated by reference in their entirety.

[0800] The guide RNAs and/or mRNA (or DNA) encoding an endonuclease can be chemically linked to one or more moieties or conjugates that enhance the activity, cellular distribution, or cellular uptake of the oligonucleotide. Non-limiting examples of such moieties include lipid moieties such as a cholesterol moiety, cholic acid, a thioether, a thiocholesterol, an aliphatic chain (e.g., dodecandiol or undecyl residues), a phospholipid, e.g., di-hexadecyl-rac-glycerol or triethylammonium 1,2-di-O-hexadecyl-rac-glycero-3-H-phosphonate, a polyamine or a polyethylene glycol chain, adamantane acetic acid, a palmityl moiety and an octadecylamine or hexylamino-carbonyl-t oxycholesterol moiety. See for example US Patent Publication No. 20180127786, the disclosure of which is herein incorporated by reference in its entirety.

### Therapeutic Applications

[0801] For therapeutic applications, the engineered cells, populations thereof, or compositions thereof are administered to a subject, generally a mammal, generally a human, in an effective amount. The engineered cells may be administered to a subject by infusion (e.g., continuous infusion over a period of time) or other modes of administration known to those of ordinary skill in the art.

[0802] The engineered cells provided herein not only find use in gene therapy but also in non-pharmaceutical uses such as, e.g., production of animal models and production of recombinant cell lines expressing a protein of interest.

[0803] The engineered cells of the present disclosure can be any cell, generally a mammalian cell, generally a human cell that has been modified by integrating a transgene at a safe harbor locus described herein. Exemplary cells are provided in the Recombinant Cells section.

[0804] The engineered cells, compositions and methods of the present disclosure are useful for therapeutic applications such as CAR T cell therapy and TCR T cell therapy. In some embodiments, the insertion of a sequence encoding a transgene within a safe harbor locus maintains the TCR expression relative to instances when there is no insertion and enables transgene expression while maintaining TCR function.

[0805] In some embodiments, the present disclosure provides methods of treating a subject in need of treatment by administering to the subject a composition comprising any of the engineered cells described herein. In some embodiments, administration of the engineered cell composition results in a desired pharmacological and/or physiological effect. That effect can be partial or complete cure of the disease and/or adverse effects resulting from the disease. In some embodiments, treatment encompasses any treatment of a disease in a subject (e.g., mammal, e.g., human). Further, treatment may stabilize or reduce undesirable clinical symptoms in subjects (e.g., patients). The cells provided herein populations thereof, or compositions thereof may be administered during or after the occurrence of the disease.

[0806] In certain embodiments, the subject has a disease, condition, and/or injury that can be treated and/or ameliorated by cell therapy. In some embodiments, the subject in need of cell therapy is a subject having an injury, disease, or condition, thereby causing cell therapy (e.g., therapy in which cellular material is administered to the subject). However, it is contemplated that it is possible to treat, ameliorate and/or reduce the severity of at least one symptom associated with the injury, disease or condition.

### Method of Administration

[0807] An effective amount of the immune cell comprising the system may be administered for the treatment of cancer. The appropriate dosage of the immune cell comprising the system may be determined based on the type of cancer to be treated, the type of the immune cell comprising the system, the severity and course of the cancer, the clinical condition of the subject the subject's clinical history and response to the treatment, and the discretion of the attending physician.

### Pharmaceutical Compositions

[0808] The engineered recombinant cells provided herein can be administered as part of a pharmaceutical compositions. These compositions can comprise, in addition to one or more of the recombinant cells, a pharmaceutically acceptable excipient, carrier, buffer, stabilizer or other materials well known to those skilled in the art. Such materials should be non-toxic and should not interfere with the efficacy of the active ingredient. The precise nature of the carrier or other material can depend on the route of administration, e.g., oral, intravenous, cutaneous or subcutaneous, nasal, intramuscular, intraperitoneal routes. The pharmaceutical composition may comprise one or more pharmaceutical excipients. Any suitable pharmaceutical excipient may be used, and one of ordinary skill in the art is capable of selecting suitable pharmaceutical excipients. Accordingly, the pharmaceutical excipients provided below are intended to be illustrative, and not limiting. Additional pharmaceutical excipients include, for example, those described in the Handbook of Pharmaceutical Excipients, Rowe et al. (Eds.) 6th Ed. (2009), incorporated by reference in its entirety.

[0809] Various modes of administering the additional therapeutic agents are contemplated herein. In some embodiments, the additional therapeutic agent is administered by any suitable mode of administration.

[0810] A composition can be administered alone or in combination with other treatments, either simultaneously or sequentially dependent upon the condition to be treated.

### Kits and Articles of Manufacture

[0811] The present application provides kits comprising any one or more of the system or cell compositions described herein along with instructions for use. The instructions for use can be present in the kits as a package insert, in the labeling of the container of the kit or components thereof, or can be in digital form (e.g., on a CD-ROM, via a link on the internet). A kit can include one or more of a genome-targeting nucleic acid, a polynucleotide encoding a genome-targeting nucleic acid, a site-directed polypeptide, and/or a polynucleotide encoding a site-directed polypeptide. Additional components within the kits are also contemplated, for example, buffer (such as reconstituting buffer, stabilizing buffer, diluting buffer), and/or one or more control vectors.

[0812] In some embodiments, the kits further contain a component selected from any of secondary antibodies, reagents for immunohistochemistry analysis, pharmaceutically acceptable excipient and instruction manual and any combination thereof. In one specific embodiment, the kit comprises a pharmaceutical composition comprising any one or more of the antibody compositions described herein, with one or more pharmaceutically acceptable excipients.

[0813] The present application also provides articles of manufacture comprising any one of the antibody compositions or kits described herein. Examples of an article of manufacture include vials (including sealed vials).

### EXAMPLES

### Example 1: TMPRSS4 Antibody Discovery

[0814] This example discloses the identification and selection of antigen binding proteins (e.g., antibodies or antigen binding fragments thereof such as single chain variable fragments (scFv)) that bind to TMPRSS4 using cell-based phage display. The SuperHuman2.0 Library from Charles River was used to discover the antibodies targeting human TMPRSS4 by iterative binding of phage to the cell surface expression TMPRSS4. The antibodies obtained specifically bind to engineered HEK293T with full length TMPRSS4 over-expression.

### Materials and Methods

### Cell Line Engineering for TMPRSS4 Expression

[0815] HEK293T was selected as a parental cell line. TMPRSS4 full-length, TMPRSS4 truncated format with a 150 amino acid residue ECD, and TMPRSS4 catalytic inactive format (comprising a D290A mutation) were transfected individually into HEK293T cells (FIG. 9). Separate HEK293T cell lines were generated for each of the three different forms of TMPRSS4. TMPRSS4 expression in the engineered HEK293T cells was validated by flow cytometry.

### Cell-Based Phage Selection

[0816] Four iterative rounds of phage selection were performed against the HEK293T cells engineered to overexpress human TMPRSS4 with the SuperHuman2.0 Library. This library contains fully human scFvs in a single VH-VL orientation with the (G₄S)₃ linker (SEQ ID NO: 819). The phage library was incubated with the cells, and non-binding phage was removed by washing, followed by elution of specifically bound phage. The enrichment of antibodies against TMPRSS4 was evaluated by polyclonal phage flow cytometry against HEK293T-TMPRSS4.

### Monoclonal Phage Screening and Positive Hits Sequencing

[0817] Monoclonal phages were prepared, screened for binding to HEK293T-TMPRSS4 cells by flow cytometry. Monoclonal phage clones were incubated with HEK293T-TMPRSS4 cells, the cells were washed and then incubated with a PE conjugated mouse anti-M13 mAb, and washed again before being analyzed by flow cytometry. The positive candidates were selected based on cytometry results, then followed by next-gen sequencing of the positive hits.

### Binding Activity Validation

[0818] To validate the binding activity of the positive hits to TMPRSS4, 5 candidate VH/VL pairs were cloned into mammalian expression vectors containing the mouse IgG2a constant domains. The resulting chimeric mlgG2a antibodies were transiently expressed from CHO cultures and purified via affinity chromatography. TMPRSS4-expressing HEK293T cell lines were used to assess the binding of recombinant antibodies to cell surface expressed TMPRSS4. Briefly, HEK293T parental and HEK293T-TMPRSS4 engineered cells were first blocked with a human Fc blocker for 10 min at room temperature, stained for 30 min on ice with recombinant antibodies in an 8-point serial dilution, and washed 3 times with BD Stain Buffer. Subsequently, cells were stained for 30 min on ice with anti-mouse IgG2a-PE secondary antibody. Cell surface binding was measured on an Attune flow cytometer.

### Results

### Cell Line Engineering for TMPRSS4 Expression

[0819] The different formats of TMPRSS4 were expressed on the surface of HEK293T cells with at least a 2 log shift compared to parental cell lines. The wild type full length TMPRSS4 is cell line CL681, the truncated TMPRSS4 is cell line CL610 and the catalytical inactive TMPRSS4 D290A is cell line CL612 (data not shown).

### Phage Antigen Binding Protein Enrichment Validation

[0820] Four iterative rounds of phage selection were performed against HEK293-TMPRSS4 (cell line CL681). The enrichment of antibodies against TMPRSS4 was then evaluated by polyclonal phage flow cytometry. Enrichment was observed from round 3 panning, and the phage antibodies were further enriched after round 4 (data not shown).

### The Monoclonal Phage Screening Results and Unique Positive Hits Sequence

[0821] As the polyclonal phage showed antibody enrichment against TMPRSS4, the monoclonal phages were screened for binding to the HEK293T-TMPRSS4 cell line by flow cytometry to identify the positive hits. There were 14 positive hits from round 3 and 303 positive hits from round 4 for a total of 317 positive hits from both rounds of monoclonal screening. The positive hits were analyzed by next-generation sequencing (NGS) to determine the antibody sequences. The sequence results showed 79 unique antibodies. The 79 unique scFv sequences are listed in Table 4. Flow cytometry histograms of the 79 unique antibodies binding to the HEK293T-TMPRSS4 cell line are shown in FIG. 1C.

[0822] To validate the binding activity of phage antibodies to TMPRSS4, five candidate VH/VL pairs were reformatted to mouse IgG2 chimeric recombinant proteins. Binding of the mIgG2 chimeric recombinant antibodies to TMPRSS4 was assessed by cell-binding dose curves on parental HEK293T and HEK293T-TMPRSS4 cell lines. The five antibodies bound specifically to the TMPRSS4-expressing cell line and did not bind to the TMPRSS4-negative parental cells (FIG. 1A), indicating the antibodies discovered by cell-based phage selection can function as TMPRSS4 antigen recognition domains. In addition, 4 of 5 antibodies were found to bind to the membrane-proximal domain of TMPRSS4 as indicated by binding to both the CL610 cell line expressing the catalytically inactive TMPRSS4 D290A and also to the CL612 cell line expressing the truncated TMPRSS4 that lacks the distal domain of the antigen (FIG. 1B). To validate that binding of the antibodies was independent of catalytic activity, cell binding of the selected antibodies to 293T-TMPRSS4 D290A cells was assessed via flow cytometry. All five TMPRSS4 antibodies tested showed similar binding compared to the 293T-TMPRSS4 WT cells, thereby indicating that the binding was independent of TMPRSS4 catalytic activity (FIG. 25).

### Example 2: Development of TMPRSS4 Constitutive CARs

### Materials and Methods

### Generation of Cells Expressing TMPRSS4 Constitutive CARs

[0823] Selected TMPRSS4 antibodies identified in Example 1 and 6 other TMPRSS4 antibodies from the phage screen were next used to prepare chimeric antigen receptors (CARs) for further screening. CAR constructs included (from 5′ to 3′) a CD8 signal peptide (SEQ ID NO: 825), a Flag epitope tag (SEQ ID NO:959), the TMPRSS4-binding scFv, a CD8α hinge domain (SEQ ID NO:821), a CD8α transmembrane domain (SEQ ID NO:822), a 4-1BB costimulatory domain (SEQ ID NO:823), and a CD35 activation domain (SEQ ID NO: 824) (FIG. 2).

[0824] T cells were activated for two days using CD3-CD28 beads. At day 2, beads were removed followed by the delivery of the CAR transgene to the GS94 site in the genome of the T cells. Transgene integration was performed using a CRISPR-based process and electroporation step by combining activated T cells, CRISPR/Cas9 RNP with an sgRNA that targeted the GS94 non-coding safe harbor loci integration site, and plasmid DNA constituting a repair template to effect insertion of the transgene cassette via cellular DNA repair machinery.

[0825] Following electroporation, cells were recovered and expanded in T cell media for 7 days. Negative control T cells were generated using a mock electroporation process that edited T cells with ribonucleoprotein (RNP) in the absence of donor plasmid (RNP control).

[0826] The GS94 CRISPR/Cas9 RNP used was generated by complexing single guide RNA (sgRNA) with recombinant Streptococcus pyogenes Cas9 (SpCas9). The sgRNA contained a protospacer sequence directing the CRISPR/Cas9 RNP to the GS94-transgene integration site. The plasmid DNA repair template contained the CAR transgene cassette, flanked by 450 base pair (bp) sequences homologous to the regions flanking the integration site to effect repair-mediated insertion.

### Flow Cytometry

[0827] Cell count and % editing were determined by pelleting cells at 300×g for 5 min, and resuspending in FACS buffer containing anti-FLAG BV421 for surface CAR expression or antibodies for markers of activation (CD25) or exhaustion (TIM3). Following a 20 min staining period at room temperature, cells were spun down and washed 1× with FACS Buffer. Following a spin down, cells were resuspended in 50 μL of FACS buffer, then topped with 50 μL of CountBright Plus counting beads. Data were acquired on an Attune N×T flow cytometer. FSC and SSC parameters were used to specify gates for counting beads versus T cells. Absolute cell count was derived by using the formula: Cells/μL=(Cell count/Counting beads count)×Counting beads concentration from bottle. Fold change of edited T cell number and % edited T cells was determined by the formula: T-cell fold change from D0=(T cell count at D6/T cell count at DO).

### Cytotoxicity Assays

[0828] CAR-expressing cells were co-cultured with target cells at varying E:T ratios for 72 hours at 37° C. Following incubation, cytotoxicity was measured using a luciferase reporter assay. Data are presented as the mean±standard deviation of 3 donors.

### Cytokine Secretion

[0829] To further assess the specificity and function of T cells expressing CARs, supernatants were collected from target cytotoxicity co-cultures (Effector: Target ratio of 1:1, 72 hour co-culture). Following incubation, supernatants were collected at endpoint and cytokine release levels were measured using a Luminex assay.

### Results

### Generation of Cells Expressing TMPRSS4 Constitutive CARs

[0830] CAR expression constructs were introduced into T cells isolated from three donors by electroporation as described above. CAR expression was measured by flow cytometry to assess the percentage of cells having CAR knock-in (FIG. 3A) and receptor expression level as measured by geometric mean fluorescence intensity (gMFI) (FIG. 3B). CAR-expressing T cells were gated on expression of CD4 or CD8 and further analyzed for expression of CCR7 and CD45RA to classify cells into central memory T cells (T_{CM}; CCR7⁺/CD45RA-), stem cell memory T cells (T_{CSM}; CCR7⁺/CD45RA⁺), effector memory T cells (T_{EM}; CCR7⁻/CD45RA⁻), and effector memory T cells re-expressing CD45RA (T_{EMRA}; CCR7⁻/CD45RA⁺). Similar to RNP control, CAR-expressing cells were predominantly T_{CM} cells with T_{EMRA} cells being the second most prevalent subtype for both CD4⁺ (FIG. 3C) and CD8⁺ (FIG. 3D) T cells. TMPRSS4 CAR-expressing cells also showed similar surface expression of activation marker CD25 (FIGS. 4A and 4C) and exhaustion marker TIM3 (FIGS. 4B and 4D) compared to RNP control.

### Functional Assessment of Cells Expressing TMPRSS4 Constitutive CARs

[0831] Cells expressing TMPRSS4 CARs were tested for their ability to specifically kill TMPRSS4-expressing target cells. LUDLU-1 lung squamous cell carcinoma cells and H1975 non-small cell lung cancer cells were confirmed to have positive surface expression of TMPRSS4 based on flow cytometry using an exemplary TMPRSS4 antibody (FIG. 5A). T cells expressing a TMPRSS4 CAR, a control CAR, or RNP control were incubated with LUDLU-1 or H1975 target cells for 72 hours at various effector-to-target (E:T) ratios (e.g., 3:1, 1:1, 1:3, 1:9, and 1:27). Percent (%) killing of target cells was measured using a luciferase reporter assay (FIG. 5B). The TMPRSS4 antibodies were ranked based on their ability to induce cytotoxicity of LUDLU-1 and H1975 target cells.

[0832] To further assess the specificity of TMPRSS4 CARS, TMPRSS4 was knocked out in H1975 cells, and loss of TMPRSS4 surface expression was confirmed by flow cytometry using the exemplary TMPRSS4 antibody (FIG. 6A). TMPRSS4 CAR-expressing T cells were incubated with wild-type and TMPRSS4-knockout H1975 cells for 72 hours at various E:T ratios, and killing of target cells was measured by luciferase assay. (FIG. 6B). CARs that demonstrated cytotoxicity against wild-type H1975 cells also demonstrated no killing of TMPRSS4-knockout cells, indicating the cytotoxicity induced by the TMPRSS4 CARs was target-specific.

[0833] To assess activation of T cells, secretion of interferon gamma (IFNγ) and tumor necrosis factor alpha (TNFα) was measured from T cells incubated for 72 hours with TMPRSS4-positive LUDLU-1 and H1975 target cells, as well as TMPRSS4-knockout H1975 cells at an E:T ratio of 1:1. Secretion of both IFNγ and TNFα was highest in cells incubated with LUDLU-1 cells (FIGS. 7A and 8A), with lower secretion observed from cells incubated wild-type H1975 cells (FIGS. 7B and 8B), and nearly undetectable IFNγ or TNFα secretion was observed from CAR-expressing cells incubated with TMPRSS4 knockout H1975 (H1975-TMPRSS4 KO) cells (FIGS. 7C and 8C). These results align to the levels of TMPRSS4 surface expression observed by flow cytometry for each cell line (FIGS. 5A and 6A).

### Activation of Cells by Different TMPRSS4 Forms

[0834] To assess the ability of the TMPRSS4 antibodies to bind to specific forms of TMPRSS4, two mutant constructs of TMPRSS4 were prepared (FIG. 9): one having a mutation ablating serine protease activity (“catalytic inactive” TMPRSS4) and the other having a truncation of the serine protease domain (“cleaved/truncated” TMPRSS4). Wild-type TMPRSS4, as well as the two mutants, were each expressed in HEK293T cells. Transduced HEK293T cells, TMPRSS4-negative parental HEK293T cells, and naturally TMPRSS4-expressing LUDLU-1 cells were incubated with T cells expressing a TMPRSS4 CAR or a control CAR at a 1:1 E:T ratio for 24 hours. T cells were collected after incubation, gated for live cells expressing CD3 and Flag (CAR expression), and analyzed by flow cytometry for expression of early T cell activation marker CD69. Most tested TMPRSS4 antibodies showed similar activation for all three TMPRSS4 forms indicating that they bind to the membrane-proximal domain of TMPRSS4. In contrast, TMPRSS4 Ab 17 showed strong activation by wild-type and catalytic inactive TMPRSS4, but reduced activation by truncated TMPRSS4 (FIG. 10) indicating that it binds to a membrane-distal epitope of TMPRSS4 that is not present in the “cleaved/truncated” antigen format.

### Example 3: Generation and Assessment of SLC34A2 Antibodies

[0835] This example provides methods used to generate human anti-Solute Carrier Family 34 Member 2 (SLC34A2) monoclonal antibodies.

[0836] Human SLC34A2 (alias: NPT2B) is a multi-pass transmembrane protein of the solute carrier family with annotated 8 transmembrane regions according to Uniprot (entry 095436·NPT2B_HUMAN). Structure predictions identified the longest extracellular loop (herein called ECL2), set forth in SEQ ID NO:1119 and corresponding to residues 234-362 within human SLC34A2 protein, as the optimal target region for raising antibodies.

SLC34A2 extracellular loop
(ECL2; SEQ ID NO: 1119)
VEVATHYLEIITQLIVESFHFKNGEDAPDLLKVITKPFTKLIVQLDKKV
ISQIAMNDEKAKNKSLVKIWCKTFTNKTQINVTVPSTANCTSPSLCWTD
GIQNWTMKNVTYKENIAKCQHIFVNFHLPDL

### A. Immunization Strategies

[0837] Human antibodies that bind to SLC34A2 were generated by immunizing mice that were genetically modified to produce antibodies containing fully human antibody variable regions with three different antigen approaches.

[0838] The goal of the three different antigen approaches was to generate optimal antibody diversity towards human SLC34A2. Specifically, the mice were immunized with one of the following immunogens:
[0839] (i) an SLC34A2-KLH conjugate composed of a SLC34A2 peptide fragment (underlined and bold amino acids in ECL2 sequence, corresponding to amino acids 79-106 of ECL2 sequence set forth in SEQ ID NO: 1119 with a C-terminal Cysteine residue (SEQ ID NO: 1150), which served as an acceptor for conjugation to KLH (Q10583.2; SEQ ID NO: 1151);
[0840] (ii) an SLC34A2 recombinant fusion protein (SEQ ID NO: 1152) composed of the human SLC34A2 ECL2 sequence (SEQ ID NO: 1119) fused to a murine Fc domain (SEQ ID NO: 1153);
[0841] (iii) cells expressing SLC34A2, namely EpH4 cells, which are a murine breast cancer cell line modified to overexpress full-length human SLC34A2 (SEQ ID NO: 962).

[0842] Mice were injected up to 9 times intraperitoneally, subcutaneously, or in the hock. The mice immunized with peptide (i) or cells (iii) were given a priming dose of human SLC34A2 DNA (NM_006424; SEQ ID NO: 963) linked to gold particles that was administered using a gene gun. The spleen and lymph nodes of serum-titer positive mice were harvested and antibodies specific to human SLC34A2 were generated using single B cell cloning.

### B. Single B Cell Cloning and Antibody Sequencing

[0843] Single B cell cloning (SBC) was used to isolate SLC34A2-specific monoclonal antibodies from the immunized mice described above. The lymph nodes and/or spleen cells were incubated and stained using markers identifying live and dead cells, markers identifying IgG-positive class-switched memory B-cells, as well as two or more soluble SLC34A2 antigens (SLC34A2 peptide set forth as INVTVPSTANCTSPSLCWTDGIQNWTMK (SEQ ID NO: 1149 and/or SLC34A2 recombinant fusion protein set forth in SEQ ID NO: 1152).

[0844] Using a FACS sorter, antigen-specific B cells were individually sorted at 1 cell per well into multi-well plates containing lysis buffer, thereby lysing the cells and releasing the RNA. Lysates were subjected to multiple rounds of PCR to isolate the V_{H} and V_{L} regions of the captured B cell receptor for next generation sequencing (NGS) and to append promoter/signal peptide and constant region blocks to the requisite ends of the variable region.

[0845] The final PCR reactions generated Transcriptionally Active PCR (TAP) (Liang et al., J Biol Chem. 2002:277 (5): 3593-8) products that were transfected via high-throughput methods into Expi293 cells and purified using protein A to generate small-scale amounts of recombinant hIgG1/kappa antibody (SEQ ID NOS: 1247 and 1248) material for screening by ELISA and flow cytometry.

[0846] The V_{H} and V_{L} regions from the positive human SLC34A2 monoclonal antibodies were recovered and sequenced by next generation sequencing (NGS).

### C. Binding to SLC34A2 Positive Cells

[0847] Antibodies were screened by standard flow cytometry methods for binding to human OVCAR-3 human ovarian cancer cells which endogenously express human SLC34A2. HEK293 cells were used as a non-transfected negative control. Briefly, OVCAR-3 and HEK293 cells that had been detached were incubated at 4° C. for 30-60 minutes with 8 serial dilutions of the SLC34A2 antibody (eight 5-fold dilution steps, starting from a top concentration of 133 nM Ab). Cells were washed before adding fluorescently labelled anti-human Fc secondary antibody (AF647 F(ab′)₂ gt-anti-hu IgG Fc-specific; Jackson Cat No 109-606-098) for at least 30 minutes at 4° C. Stained cells were then resuspended in cold FACS buffer and analyzed by flow cytometry for geometric mean fluorescent intensity (GeoMFI) and total cell counts on an iQue automated flow cytometer.

[0848] About 262 antibodies that bind specifically to SLC34A2-expressing OVCAR3 cells were identified. 16 antibodies were chosen for further characterization. The sequences of these 16 SLC34A2 antibodies are shown in Table 23 below. Table 23 sets forth the SEQ ID NO corresponding to the sequence for the V_{H} and three HCDRs, and V_{L} and three LCDRs.

TABLE 23
Sequence identifier (SEQ ID NO:) for SLC34A2 Antibodies

| SLC34A2 | SEQ ID NO: | | | | | | | |
|---|---|---|---|---|---|---|---|---|
| Antibody | V_{H} | CDR-H1 | CDR-H2 | CDR-H3 | V_{L} | CDR-L1 | CDR-L2 | CDR-L3 |
| SLC34A2 Ab 1 | 1001 | 1002 | 1003 | 1004 | 1005 | 1006 | 1007 | 1008 |
| SLC34A2 Ab 2 | 1009 | 1010 | 1011 | 1012 | 1013 | 1006 | 1007 | 1014 |
| SLC34A2 Ab 3 | 1015 | 1016 | 1017 | 1018 | 1019/1125 | 1020 | 1021 | 1022 |
| and 3.1 | | | | | | | | |
| SLC34A2 Ab 4 | 1023 | 1024 | 1025 | 1026 | 1027 | 1028 | 1029 | 1030 |
| SLC34A2 Ab 5 | 1031 | 1032 | 1033 | 1034 | 1035/1154 | 1036 | 1037 | 1038 |
| and 5.1 | | | | | | | | |
| SLC34A2 Ab 6 | 1039 | 1040 | 1041 | 1042 | 1043/1155 | 1044 | 1045 | 1046 |
| and 6.1 | | | | | | | | |
| SLC34A2 Ab 7 | 1047 | 1048 | 1049 | 1050 | 1051 | 1036 | 15 | 1052 |
| SLC34A2 Ab 8 | 1053 | 1048 | 1054 | 1055 | 1056 | 1036 | 1057 | 1058 |
| SLC34A2 Ab 9 | 1059 | 1060 | 1061 | 1062 | 1063/1156 | 1064 | 1021 | 1065 |
| and 9.1 | | | | | | | | |
| SLC34A2 Ab 10 | 1066 | 1067 | 1068 | 1069 | 1070/1233 | 1028 | 1071 | 1072 |
| and 10.1 | | | | | | | | |
| SLC34A2 Ab 11 | 1073 | 1032 | 1074 | 1075 | 1076 | 1251 | 15 | 1077 |
| SLC34A2 Ab 12 | 1078 | 1079 | 1080 | 1081 | 1082 | 1036 | 15 | 1083 |
| SLC34A2 Ab 13 | 1084 | 1085 | 1086 | 1087 | 1088 | 1089 | 1021 | 1065 |
| SLC34A2 Ab 14 | 1090 | 1010 | 1091 | 1092 | 1093 | 1006 | 1007 | 1008 |
| SLC34A2 Ab 15 | 1094 | 1095 | 1003 | 1096 | 1097/1234 | 1036 | 1098 | 1099 |
| and 15.1 | | | | | | | | |
| SLC34A2 Ab 16 | 1100 | 1101 | 1102 | 1096 | 1103/1250 | 1251 | 1104 | 1105 |
| and 16.1 | | | | | | | | |

### Example 4: SLC34A2 Antibody Epitope Binding

[0849] This example provides methods used to determine the epitope recognized by SLC34A2 monoclonal antibodies in Table 21 of Example 3.

[0850] The epitope recognized by the SLC34A2 antibodies was determined by ELISA binding assays using the SLC34A2 peptide immunogen (SEQ ID NO: 1149), the ECL-mFc fusion protein (SEQ ID NO: 1249), and a biotinylated irrelevant peptide as negative control. Briefly, NeutrAvidin plates were coated at 1 μg/ml overnight, washed and incubated with blocking buffer for at least 1 hr. Biotinylated antigens as well as irrelevant antigens were then added at 1 μg/ml for at least 1 hr at RT, followed by rigorous washing. HRP-conjugated anti-human Fc detection reagent (goat anti-human IgG-Fc-HRP cat: 109-036-098; Jackson ImmunoResearch) was applied and incubated at 4° C. for 30-60 min. After additional wash steps, 3,3′,5,5′-Tetramethylbenzidine (TMB) substrate was added and optical density read using an appropriate plate reader.

[0851] The epitope identified for each of the 16 antibodies is shown in Table 24. EC50 values for binding SLC34A2-expressing OVCAR3 cells as determined in Example 3 are also shown in

TABLE 24
Several strong antibodies with an EC50 less than 15 nM were identified.
Table 24. EC50 for SLC34A2 Antibodies

| | | | | | Max | |
|---|---|---|---|---|---|---|
| | | | | SEQ | Signal by | EC50 [nM] |
| SLC34A2 | | Epitope | | ID | flow | by flow |
| Antibody | Immunogen | Recognized | HCDR3 | NO: | cytometry | cytometry |
| Ab 8 | mECL2-Fc | N.N. | HPAGYSSSWSAFDI | 1055 | 354 | 6 |
| | protein | | | | | |
| Ab 11 | mECL2-Fc | N.N. | HPRGIAARWGNWFDP | 1075 | 224 | 6 |
| | protein | | | | | |
| Ab 4 | DNA + cells | ECL2+/peptide- | DGPLWGNYFDY | 1026 | 277 | 5 |
| Ab 5 | DNA + cells | ECL2+/peptide- | HGRGTIGYFDY | 1034 | 271 | 5 |
| Ab 6 | DNA + cells | ECL2+/peptide- | QGTNWGLYFDY | 1042 | 211 | 6 |
| Ab 7 | mECL2-Fc | ECL2+/peptide | HPAGYSTRWSAFDI | 1050 | 278 | 16 |
| | protein | weak | | | | |
| Ab 12 | mECL2-Fc | peptide 1+/ | HPRGSYGANFDY | 1081 | 305 | 5 |
| | protein | ECL2+ | | | | |
| Ab 13 | mECL2-Fc | peptide 1+/ | IPALRFLEWLP | 1087 | 233 | 41 |
| | protein | ECL2+ | | | | |
| Ab 3 | mECL2-Fc | peptide 1+/ | IPVLRFLEWLP | 1018 | 232 | 24 |
| | protein | ECL2+ | | | | |
| Ab 9 | mECL2-Fc | peptide 1+/ | IPVSRFLEWLP | 1062 | 281 | 37 |
| | protein | ECL2+ | | | | |
| Ab 10 | mECL2-Fc | peptide 1+/ | RGYTYGYFFDY | 1069 | 218 | 20 |
| | protein | ECL2+ | | | | |
| Ab 1 | Peptide-1 | peptide 1+/ | WMTKVKGYFDY | 1004 | 353 | 7 |
| | | ECL2+ | | | | |
| Ab 2 | Peptide-1 | peptide 1+/ | WMTTIKGYFDY | 1012 | 330 | 7 |
| | | ECL2+ | | | | |
| Ab 11 | Peptide-1 | peptide 1+/ | WMTTVKGYFDY | 1092 | 288 | 9 |
| | | ECL2+ | | | | |
| Ab 15 | Peptide-1 | peptide 1+/ | YIVGRPGFNWFDP | 1096 | 346 | 8 |
| | | ECL2+ | | | | |
| Ab 16 | Peptide-1 | peptide 1+/ | YIVGRPGFNWFDP | 1096 | 296 | 6 |
| | | ECL2+ | | | | |

N.N. means epitope is unknown; ECL2 corresponds to SEQ ID NO: 1119; peptide 1 corresponds to SEQ ID NO: 1149.

### Example 5: Development of TMPRSS4 CAR and SLC34A2 Priming Receptor Logic Gates

### Materials and Methods

### Logic Gate Construction and Screening

[0852] A library of 368 circuits (also called logic gates), composed of 8 TMPRSS4 CARs from an initial 78 CAR library, and 17 SLC34A2 PrimeRs, with some tested in two scFv orientations (e.g., V_{H}-V_{L} and V_{L}-V_{H}) was cloned with and without fidelity tuning and tested to identify circuits with maximized potency and fidelity profiles. The antibody combinations used in the 368 circuits is provided in Table 25.

TABLE 25
Circuit Library

| Logic | | |
|---|---|---|
| Gate | TMPRSS4 | SCL34A2 |
| (LG) # | scFv | scFv |
| 1 | AB 14 | Ab 4 |
| 2 | AB 40 | Ab 4 |
| 3 | AB 48 | Ab 4 |
| 4 | AB 62 | Ab 4 |
| 5 | AB 12 | Ab 4 |
| 6 | AB 7 | Ab 4 |
| 7 | AB 49 | Ab 4 |
| 8 | AB 29 | Ab 4 |
| 9 | AB 14 | Ab 6 |
| 10 | AB 40 | Ab 6 |
| 11 | AB 48 | Ab 6 |
| 12 | AB 62 | Ab 6 |
| 13 | AB 12 | Ab 6 |
| 14 | AB 7 | Ab 6 |
| 15 | AB 49 | Ab 6 |
| 16 | AB 29 | Ab 6 |
| 17 | AB 14 | Ab 12 |
| 18 | AB 40 | Ab 12 |
| 19 | AB 48 | Ab 12 |
| 20 | AB 62 | Ab 12 |
| 21 | AB 12 | Ab 12 |
| 22 | AB 7 | Ab 12 |
| 23 | AB 49 | Ab 12 |
| 24 | AB 29 | Ab 12 |
| 25 | AB 14 | Ab 3 |
| 26 | AB 40 | Ab 3 |
| 27 | AB 48 | Ab 3 |
| 28 | AB 62 | Ab 3 |
| 29 | AB 12 | Ab 3 |
| 30 | AB 7 | Ab 3 |
| 31 | AB 49 | Ab 3 |
| 32 | AB 29 | Ab 3 |
| 33 | AB 14 | Ab 1 |
| 34 | AB 40 | Ab 1 |
| 35 | AB 48 | Ab 1 |
| 36 | AB 62 | Ab 1 |
| 37 | AB 12 | Ab 1 |
| 38 | AB 7 | Ab 1 |
| 39 | AB 49 | Ab 1 |
| 40 | AB 29 | Ab 1 |
| 41 | AB 14 | Ab 2 |
| 42 | AB 40 | Ab 2 |
| 43 | AB 48 | Ab 2 |
| 44 | AB 62 | Ab 2 |
| 45 | AB 12 | Ab 2 |
| 46 | AB 7 | Ab 2 |
| 47 | AB 49 | Ab 2 |
| 48 | AB 29 | Ab 2 |
| 49 | AB 14 | Ab 16 |
| 50 | AB 40 | Ab 16 |
| 51 | AB 48 | Ab 16 |
| 52 | AB 62 | Ab 16 |
| 53 | AB 12 | Ab 16 |
| 54 | AB 7 | Ab 16 |
| 55 | AB 49 | Ab 16 |
| 56 | AB 29 | Ab 16 |
| 57 | AB 14 | Ab 8 |
| 58 | AB 40 | Ab 8 |
| 59 | AB 48 | Ab 8 |
| 60 | AB 62 | Ab 8 |
| 61 | AB 12 | Ab 8 |
| 62 | AB 7 | Ab 8 |
| 63 | AB 49 | Ab 8 |
| 64 | AB 29 | Ab 8 |
| 65 | AB 14 | Ab 5 |
| 66 | AB 40 | Ab 5 |
| 67 | AB 48 | Ab 5 |
| 68 | AB 62 | Ab 5 |
| 69 | AB 12 | Ab 5 |
| 70 | AB 7 | Ab 5 |
| 71 | AB 49 | Ab 5 |
| 72 | AB 29 | Ab 5 |
| 73 | AB 14 | Ab 7 |
| 74 | AB 40 | Ab 7 |
| 75 | AB 48 | Ab 7 |
| 76 | AB 62 | Ab 7 |
| 77 | AB 12 | Ab 7 |
| 78 | AB 7 | Ab 7 |
| 79 | AB 49 | Ab 7 |
| 80 | AB 29 | Ab 7 |
| 81 | AB 14 | Ab 13 |
| 82 | AB 40 | Ab 13 |
| 83 | AB 48 | Ab 13 |
| 84 | AB 62 | Ab 13 |
| 85 | AB 12 | Ab 13 |
| 86 | AB 7 | Ab 13 |
| 87 | AB 49 | Ab 13 |
| 88 | AB 29 | Ab 13 |
| 89 | AB 14 | Ab 10 |
| 90 | AB 40 | Ab 10 |
| 91 | AB 48 | Ab 10 |
| 92 | AB 62 | Ab 10 |
| 93 | AB 12 | Ab 10 |
| 94 | AB 7 | Ab 10 |
| 95 | AB 49 | Ab 10 |
| 96 | AB 29 | Ab 10 |
| 97 | AB 14 | Ab 14 |
| 98 | AB 40 | Ab 14 |
| 99 | AB 48 | Ab 14 |
| 100 | AB 62 | Ab 14 |
| 101 | AB 12 | Ab 14 |
| 102 | AB 7 | Ab 14 |
| 103 | AB 49 | Ab 14 |
| 104 | AB 29 | Ab 14 |
| 105 | AB 14 | Ab 15 |
| 106 | AB 40 | Ab 15 |
| 107 | AB 48 | Ab 15 |
| 108 | AB 62 | Ab 15 |
| 109 | AB 12 | Ab 15 |
| 110 | AB 7 | Ab 15 |
| 111 | AB 49 | Ab 15 |
| 112 | AB 29 | Ab 15 |
| 113 | AB 14 | Ab 4 |
| 114 | AB 40 | Ab 4 |
| 115 | AB 48 | Ab 4 |
| 116 | AB 62 | Ab 4 |
| 117 | AB 12 | Ab 4 |
| 118 | AB 7 | Ab 4 |
| 119 | AB 49 | Ab 4 |
| 120 | AB 29 | Ab 4 |
| 121 | AB 14 | Ab 6 |
| 122 | AB 40 | Ab 6 |
| 123 | AB 48 | Ab 6 |
| 124 | AB 62 | Ab 6 |
| 125 | AB 12 | Ab 6 |
| 126 | AB 7 | Ab 6 |
| 127 | AB 49 | Ab 6 |
| 128 | AB 29 | Ab 6 |
| 129 | AB 14 | Ab 12 |
| 130 | AB 40 | Ab 12 |
| 131 | AB 48 | Ab 12 |
| 132 | AB 62 | Ab 12 |
| 133 | AB 12 | Ab 12 |
| 134 | AB 7 | Ab 12 |
| 135 | AB 49 | Ab 12 |
| 136 | AB 29 | Ab 12 |
| 137 | AB 14 | Ab 3 |
| 138 | AB 40 | Ab 3 |
| 139 | AB 48 | Ab 3 |
| 140 | AB 62 | Ab 3 |
| 141 | AB 12 | Ab 3 |
| 142 | AB 7 | Ab 3 |
| 143 | AB 49 | Ab 3 |
| 144 | AB 29 | Ab 3 |
| 145 | AB 14 | Ab 1 |
| 146 | AB 40 | Ab 1 |
| 147 | AB 48 | Ab 1 |
| 148 | AB 62 | Ab 1 |
| 149 | AB 12 | Ab 1 |
| 150 | AB 7 | Ab 1 |
| 151 | AB 49 | Ab 1 |
| 152 | AB 29 | Ab 1 |
| 153 | AB 14 | Ab 2 |
| 154 | AB 40 | Ab 2 |
| 155 | AB 48 | Ab 2 |
| 156 | AB 62 | Ab 2 |
| 157 | AB 12 | Ab 2 |
| 158 | AB 7 | Ab 2 |
| 159 | AB 49 | Ab 2 |
| 160 | AB 29 | Ab 2 |
| 161 | AB 14 | Ab 16 |
| 162 | AB 40 | Ab 16 |
| 163 | AB 48 | Ab 16 |
| 164 | AB 62 | Ab 16 |
| 165 | AB 12 | Ab 16 |
| 166 | AB 7 | Ab 16 |
| 167 | AB 49 | Ab 16 |
| 168 | AB 29 | Ab 16 |
| 169 | AB 14 | Ab 9 |
| 170 | AB 40 | Ab 9 |
| 171 | AB 48 | Ab 9 |
| 172 | AB 62 | Ab 9 |
| 173 | AB 12 | Ab 9 |
| 174 | AB 7 | Ab 9 |
| 175 | AB 49 | Ab 9 |
| 176 | AB 29 | Ab 9 |
| 177 | AB 14 | Ab 11 |
| 178 | AB 40 | Ab 11 |
| 179 | AB 48 | Ab 11 |
| 180 | AB 62 | Ab 11 |
| 181 | AB 12 | Ab 11 |
| 182 | AB 7 | Ab 11 |
| 183 | AB 49 | Ab 11 |
| 184 | AB 29 | Ab 11 |
| 185 | AB 14 | Ab 17 |
| 186 | AB 40 | Ab 17 |
| 187 | AB 48 | Ab 17 |
| 188 | AB 62 | Ab 17 |
| 189 | AB 12 | Ab 17 |
| 190 | AB 7 | Ab 17 |
| 191 | AB 49 | Ab 17 |
| 192 | AB 29 | Ab 17 |
| 193 | AB 14 | Ab 4 |
| 194 | AB 40 | Ab 4 |
| 195 | AB 48 | Ab 4 |
| 196 | AB 62 | Ab 4 |
| 197 | AB 12 | Ab 4 |
| 198 | AB 7 | Ab 4 |
| 199 | AB 49 | Ab 4 |
| 200 | AB 29 | Ab 4 |
| 201 | AB 14 | Ab 6 |
| 202 | AB 40 | Ab 6 |
| 203 | AB 48 | Ab 6 |
| 204 | AB 62 | Ab 6 |
| 205 | AB 12 | Ab 6 |
| 206 | AB 7 | Ab 6 |
| 207 | AB 49 | Ab 6 |
| 208 | AB 29 | Ab 6 |
| 209 | AB 14 | Ab 12 |
| 210 | AB 40 | Ab 12 |
| 211 | AB 48 | Ab 12 |
| 212 | AB 62 | Ab 12 |
| 213 | AB 12 | Ab 12 |
| 214 | AB 7 | Ab 12 |
| 215 | AB 49 | Ab 12 |
| 216 | AB 29 | Ab 12 |
| 217 | AB 14 | Ab 3 |
| 218 | AB 40 | Ab 3 |
| 219 | AB 48 | Ab 3 |
| 220 | AB 62 | Ab 3 |
| 221 | AB 12 | Ab 3 |
| 222 | AB 7 | Ab 3 |
| 223 | AB 49 | Ab 3 |
| 224 | AB 29 | Ab 3 |
| 225 | AB 14 | Ab 1 |
| 226 | AB 40 | Ab 1 |
| 227 | AB 48 | Ab 1 |
| 228 | AB 62 | Ab 1 |
| 229 | AB 12 | Ab 1 |
| 230 | AB 7 | Ab 1 |
| 231 | AB 49 | Ab 1 |
| 232 | AB 29 | Ab 1 |
| 233 | AB 14 | Ab 2 |
| 234 | AB 40 | Ab 2 |
| 235 | AB 48 | Ab 2 |
| 236 | AB 62 | Ab 2 |
| 237 | AB 12 | Ab 2 |
| 238 | AB 7 | Ab 2 |
| 239 | AB 49 | Ab 2 |
| 240 | AB 29 | Ab 2 |
| 241 | AB 14 | Ab 16 |
| 242 | AB 40 | Ab 16 |
| 243 | AB 48 | Ab 16 |
| 244 | AB 62 | Ab 16 |
| 245 | AB 12 | Ab 16 |
| 246 | AB 7 | Ab 16 |
| 247 | AB 49 | Ab 16 |
| 248 | AB 29 | Ab 16 |
| 249 | AB 14 | Ab 8 |
| 250 | AB 40 | Ab 8 |
| 251 | AB 48 | Ab 8 |
| 252 | AB 62 | Ab 8 |
| 253 | AB 12 | Ab 8 |
| 254 | AB 7 | Ab 8 |
| 255 | AB 49 | Ab 8 |
| 256 | AB 29 | Ab 8 |
| 257 | AB 14 | Ab 5 |
| 258 | AB 40 | Ab 5 |
| 259 | AB 48 | Ab 5 |
| 260 | AB 62 | Ab 5 |
| 261 | AB 12 | Ab 5 |
| 262 | AB 7 | Ab 5 |
| 263 | AB 49 | Ab 5 |
| 264 | AB 29 | Ab 5 |
| 265 | AB 14 | Ab 7 |
| 266 | AB 40 | Ab 7 |
| 267 | AB 48 | Ab 7 |
| 268 | AB 62 | Ab 7 |
| 269 | AB 12 | Ab 7 |
| 270 | AB 7 | Ab 7 |
| 271 | AB 49 | Ab 7 |
| 272 | AB 29 | Ab 7 |
| 273 | AB 14 | Ab 13 |
| 274 | AB 40 | Ab 13 |
| 275 | AB 48 | Ab 13 |
| 276 | AB 62 | Ab 13 |
| 277 | AB 12 | Ab 13 |
| 278 | AB 7 | Ab 13 |
| 279 | AB 49 | Ab 13 |
| 280 | AB 29 | Ab 13 |
| 281 | AB 14 | Ab 10 |
| 282 | AB 40 | Ab 10 |
| 283 | AB 48 | Ab 10 |
| 284 | AB 62 | Ab 10 |
| 285 | AB 12 | Ab 10 |
| 286 | AB 7 | Ab 10 |
| 287 | AB 49 | Ab 10 |
| 288 | AB 29 | Ab 10 |
| 289 | AB 14 | Ab 14 |
| 290 | AB 40 | Ab 14 |
| 291 | AB 48 | Ab 14 |
| 292 | AB 62 | Ab 14 |
| 293 | AB 12 | Ab 14 |
| 294 | AB 7 | Ab 14 |
| 295 | AB 49 | Ab 14 |
| 296 | AB 29 | Ab 14 |
| 297 | AB 14 | Ab 15 |
| 298 | AB 40 | Ab 15 |
| 299 | AB 48 | Ab 15 |
| 300 | AB 62 | Ab 15 |
| 301 | AB 12 | Ab 15 |
| 302 | AB 7 | Ab 15 |
| 303 | AB 49 | Ab 15 |
| 304 | AB 29 | Ab 15 |
| 305 | AB 14 | Ab 4 |
| 306 | AB 40 | Ab 4 |
| 307 | AB 48 | Ab 4 |
| 308 | AB 62 | Ab 4 |
| 309 | AB 12 | Ab 4 |
| 310 | AB 7 | Ab 4 |
| 311 | AB 49 | Ab 4 |
| 312 | AB 29 | Ab 4 |
| 313 | AB 14 | Ab 6 |
| 314 | AB 40 | Ab 6 |
| 315 | AB 48 | Ab 6 |
| 316 | AB 62 | Ab 6 |
| 317 | AB 12 | Ab 6 |
| 318 | AB 7 | Ab 6 |
| 319 | AB 49 | Ab 6 |
| 320 | AB 29 | Ab 6 |
| 321 | AB 14 | Ab 12 |
| 322 | AB 40 | Ab 12 |
| 323 | AB 48 | Ab 12 |
| 324 | AB 62 | Ab 12 |
| 325 | AB 12 | Ab 12 |
| 326 | AB 7 | Ab 12 |
| 327 | AB 49 | Ab 12 |
| 328 | AB 29 | Ab 12 |
| 329 | AB 14 | Ab 3 |
| 330 | AB 40 | Ab 3 |
| 331 | AB 48 | Ab 3 |
| 332 | AB 62 | Ab 3 |
| 333 | AB 12 | Ab 3 |
| 334 | AB 7 | Ab 3 |
| 335 | AB 49 | Ab 3 |
| 336 | AB 29 | Ab 3 |
| 337 | AB 14 | Ab 1 |
| 338 | AB 40 | Ab 1 |
| 339 | AB 48 | Ab 1 |
| 340 | AB 62 | Ab 1 |
| 341 | AB 12 | Ab 1 |
| 342 | AB 7 | Ab 1 |
| 343 | AB 49 | Ab 1 |
| 344 | AB 29 | Ab 1 |
| 345 | AB 14 | Ab 2 |
| 346 | AB 40 | Ab 2 |
| 347 | AB 48 | Ab 2 |
| 348 | AB 62 | Ab 2 |
| 349 | AB 12 | Ab 2 |
| 350 | AB 7 | Ab 2 |
| 351 | AB 49 | Ab 2 |
| 352 | AB 29 | Ab 2 |
| 353 | AB 14 | Ab 16 |
| 354 | AB 40 | Ab 16 |
| 355 | AB 48 | Ab 16 |
| 356 | AB 62 | Ab 16 |
| 357 | AB 12 | Ab 16 |
| 358 | AB 7 | Ab 16 |
| 359 | AB 49 | Ab 16 |
| 360 | AB 29 | Ab 16 |
| 361 | AB 14 | Ab 17 |
| 362 | AB 40 | Ab 17 |
| 363 | AB 48 | Ab 17 |
| 364 | AB 62 | Ab 17 |
| 365 | AB 12 | Ab 17 |
| 366 | AB 7 | Ab 17 |
| 367 | AB 49 | Ab 17 |
| 368 | AB 29 | Ab 17 |

[0853] Arrayed testing and down selection occurred in 2 steps. First, all circuits (i.e., logic gates) were engineered into T-cells from 2 donors and the expression of CARs and PrimeRs was evaluated by flow cytometry. A subset of 86 circuits (e.g., logic gates) was selected and these were engineered into T cells from two more donors followed by functional testing in co-culture assays. Finally, the top 5 circuits were selected for in vitro and in vivo pre clinical testing with deep functional assessment. A schematic of the T cell engineering process is provided in FIG. 11. A schematic for assessing T cells expressing a logic gate comprising a an SLC34A2 primeR and a TMPRSS4 CAR is provided in FIG. 12.

### T-Cell Engineering

[0854] T cells were activated for two days using CD3-CD28 beads. At day 2, beads were removed followed by the delivery of the CAR transgene to the GS94 site in the genome of the T cells. Transgene integration was performed using a CRISPR-based process and electroporation step by combining activated T cells, CRISPR/Cas9 RNP with an sgRNA that targeted the GS94 non-coding safe harbor loci integration site, and plasmid DNA constituting a repair template to effect insertion of the transgene cassette via cellular DNA repair machinery.

[0855] Following electroporation, cells were recovered and expanded in T cell media for 7 days. Negative control T cells were generated using a mock electroporation process that edited T cells with ribonucleoprotein (RNP) in the absence of donor plasmid (RNP control).

### T-Cell Characterization by Flow Cytometry

[0856] Cell count and % editing were determined by pelleting cells at 300×g for 5 min, and resuspending in FACS buffer containing anti-G4S-AF647 for surface CAR expression and anti-Whitlow-PE for the surface expression of primeR (% knock in (KI)). Following a 1 hr staining period at 4° C., cells were spun down and washed 1× with FACS Buffer. Following a spin down, cells were resuspended in 50 μL of FACS buffer, then topped with 50 μL of CountBright Plus counting beads. Data were acquired on an Attune NXT flow cytometer. FSC and SSC parameters were used to specify gates for counting beads versus T cells. Absolute cell count was derived by using the formula: Cells/μL=(Cell count/Counting beads count)×Counting beads concentration from bottle.

Co-Culture with Tumor Lines and Luc Based Cytotoxicity

[0857] Engineered cells were co-cultured with target cells (H1975-TMPRSS4 D290A) at varying E:T ratios for 72 hours at 37° C. Following incubation, cytotoxicity was measured using a luciferase reporter assay. Data are presented as the mean±standard deviation.

### Cytokine Secretion by Lumit

[0858] To further assess the specificity and function of T cells expressing CARs, supernatants were collected from target cytotoxicity co-cultures. Following incubation, supernatants were collected at endpoint and cytokine release levels were measured using a Lumit ELISA assay according to the manufacturer protocol.

### Repetitive Stimulation Assay (RSA)

[0859] Engineered T-cells were co-cultured with dual-antigen expressing tumor cells (SLC34A2-TMPRSS4) which also express GFP, at an E:T of 1:9 (one ICT for every 9 tumor cells) at 37° C. Every 3 days, the supernatant containing the T-cells was collected and half of it was cocultured with fresh tumor cells (volumetric split), for up to 10 days. Tumor cell viability was tracked continuously using the Incucyte imaging system. Data represents area under the curve±standard deviation.

### Results

[0860] A library composed of 8 TMPRSS4 CARs paired with 17 SLC34A2 PrimeRs in V_{L}-V_{H} orientation and 7 SLC34A2 primeRs in V_{H}-V_{L} orientation, was cloned into logic gates. The majority of primeR and CAR combinations were cloned with and without a Synthetic poly A modification on the primeR gene (2x_syn_pA), to increase potential fidelity of the circuits. The resulting library had 368 circuits in total. These were engineered in arrayed format into naive T-cells to generate logic gated (LG) T-cells (also called integrated circuit T cells or ICTs).

[0861] To select the optimal circuits, which demonstrated antigen sensitivity, high potency against tumor cells, and high logic gate fidelity, the following characteristics were evaluated in the LG cells:
[0862] % Knock-in (KI) and primeR MFI
[0863] Basal leaky expression of CAR
[0864] T-cell activity (Cytotoxicity and cytokine secretion) upon co culture with tumor cells

[0865] Down selection was performed in two tiers. In the first tier, all 368 LG cells and relevant controls were engineered into 2 donor T-cells. % KI and basal CAR expression were measured using flow cytometry via detection of Whitlow-linker in the primeR and G4S linker in the CAR genes. Leaky CAR conversion was calculated by % CAR/% KI. Circuits with >7.5% conversion were excluded from further consideration. Additionally, any LG samples with <7% KI were also excluded. Analysis was performed separately for each donor and any circuits that were inconsistent between the resulting candidate lists were excluded as well.

[0866] Finally, a small number of circuits were excluded or included based on overall performance and additional data from prior studies (rational inclusion or exclusion).

[0867] This down-selection step resulted in a list of 86 circuits with acceptable behavior for % gene knock in (KI) and % conversion (FIGS. 13A and 13B) and a range of primeR expression levels (FIG. 13C). The dark spots indicate logic gates (or circuits) that advanced to Tier 2 selection.

[0868] In tier 2, the selected subset of 86 circuits were engineered into 2 additional donor T-cells. % KI was evaluated again, and the cells were co-cultured with several tumor cell lines at various E:Ts (a schematic of the process is provided in FIG. 14). To evaluate potency, 72 hour co-cultures were done with three tumor lines; H1975 NSCLC line engineered with both TMPRSS4 and SLC34A2 at levels that match patient tumor samples (HCC70 was used as surrogate to show relevant TMPRSS4 antigen levels), and two endogenous antigen expression lines—H1648, H2347 which express slightly lower levels of TMPRSS4 compared to the engineered line (FIG. 15). Additionally, the engineered dual antigen H1975 line was used in a repetitive stimulation assay (RSA), to test long term activity of the cells. To measure circuit fidelity, H1975 cells expressing only TMPRSS4 or SLC34A2 were used. Basal activity was demonstrated using H1975 with no expression of either antigen (FIG. 15).

[0869] T-cells activity was evaluated by measuring % cytotoxicity at the end of each 72 h co-culture. RNP cells were used for normalizing basal differences between responses to the various tumor lines. For selection of top 23 LG candidates, H1975 based co-cultures with a matched E:T of 1:9 were used. The variance in the basal activity co-culture was calculated and used to create a gate of 3 standard deviations (3xSD, 22.5%) above RNP for each co culture. Any circuits demonstrating activity outside of this gate in the fidelity co-cultures, were excluded (FIGS. 16A, 16B, and 16C). FIG. 16A shows the % killing (cytotoxicity) by engineered logic gate T cells from Donor B compared to the % killing (cytotoxicity) by engineered logic gate T cells from Donor A of TMPRSS4 knockout (KO) cells. 16B shows the % killing (cytotoxicity) by engineered logic gate T cells from Donor B compared to the % killing (cytotoxicity) by engineered logic gate T cells from Donor A of TMPRSS4hi (high TMPRSS4 expression) cells. 16C shows the % killing (cytotoxicity) by engineered logic gate T cells from Donor B compared to the % killing (cytotoxicity) by engineered logic gate T cells from Donor A of SLC34A2hi (high SLC34A2 expression)-TMPRSS4 knockout (KO) cells. 16D shows the % killing (cytotoxicity) by engineered logic gate T cells from Donor B compared to the % killing (cytotoxicity) by engineered logic gate T cells from Donor A of SLC34A2-TMPRSS4 expressing cells. Additionally, any LG samples with <50% on target cytotoxicity were also excluded. This strategy yielded a list of top 23 LG candidates (FIG. 16D).

[0870] For further characterization supernatants were collected from co-cultures of T cells and SLC34A2-TMPRSS4 expressing cells at E:T of 1:9 and IFNγ secretion was measured by ELISA. Cytokine secretion was well correlated with cytotoxicity for both donors (FIGS. 17A and 17B).

[0871] Additionally, the results from the RSA, in which tumor cells viability was assessed, were inversely correlated with the cytotoxicity results of SLC34A2-TMPRSS4 expressing cells, indicating that LG cells were ranked similarly in both acute (72 h) and long term (RSA) potency assays (FIGS. 18A and 18B).

[0872] The top 23 candidates show the desired activity profile of high potency and high fidelity (low killing of cytolytic only target line) compared to the rest of the library, while maintaining a small range of variation in their individual profiles. All 23 candidates demonstrate potency even when co-cultured with tumor lines expressing lower levels of TMPRSS4 and SLC34A2 (FIGS. 19A and 19B and FIG. 20).

[0873] In order to select the best 5 LG circuits of these top 23, ranking was generated which combined measurements from all of the collected cytotoxicity data in all tested E:Ts, including the RSA. For this ranking the Z-score for each data point in each assay was calculated. The z-scores were averaged for each LG circuit across the two categories of activity. For on-target potency, Z-scores were averaged for all 3 dual-antigen expressing lines, along with the RSA scores. For fidelity, z-scores for the single antigen expressing lines were averaged. Thus two scores for each LG circuit-one for potency and one for fidelity were generated.

[0874] The scores were used to rank the circuits separately for fidelity and for potency and then selected the best in each category (two prioritizing fidelity and three prioritizing potency), which were consistent between the two donors tested (FIG. 21).

[0875] The top five candidates selected using this methodology exhibit the desired high fidelity and high potency profile for logic gate activity. All five candidates maintain potency when co-cultured with tumor lines expressing lower levels of TMPRSS4 and SLC34A2, and show little to no measurable activity when co-cultured with target cells expressing only TMPRSS4 or only SLC34A2 (FIG. 22 and FIG. 23). The five candidates were LG 239, LG 39, LG 43, LG 219, and LG 47. The DNA sequences of the logic gate circuit inserts are provided in SEQ ID NOs: 1120-1124. The LG 239 circuit comprises a synthetic polyA signal (2×polyA, SEQ ID NO: 993) while the LG 47 circuit comprises a bGH poly A signal (SEQ ID NO: 995). Table 26 provides the TMPRSS4 and SLC34A2 V_{H} and V_{L} sequences used in the scFv's used in the five circuits. Diagrams of the logic gate circuits are provided in FIG. 24.

TABLE 26

| | TMPRSS4 scFv in CAR | | | SLC34A2 scFv in primeR | | |
|---|---|---|---|---|---|---|
| | TMPRSS4 | VH SEQ | VL SEQ | SLC34A2 | VH SEQ | VL SEQ |
| LG # | Ab # | ID NO | ID NO | Ab # | ID NO | ID NO |
| LG 239 | Ab 49 | 326 | 327 | Ab 2 | 1009 | 1013 |
| (SEQ ID NO: 1121) | | | | | | |
| LG 39 | Ab 49 | 326 | 327 | Ab 1 | 1001 | 1005 |
| (SEQ ID NO: 1122) | | | | | | |
| LG 43 | Ab 48 | 319 | 320 | Ab 2 | 1009 | 1013 |
| (SEQ ID NO: 1123) | | | | | | |
| LG 219 | Ab 48 | 319 | 320 | Ab 3 | 1015 | 1125 |
| (SEQ ID NO: 1120) | | | | | | |
| LG 47 | Ab 49 | 326 | 327 | Ab 2 | 1009 | 1013 |
| (SEQ ID NO: 1124) | | | | | | |

### Example 6: In Vitro Characterization of TMPRSS4 CAR and SLC34A2 Priming Receptor Logic Gate T Cells

### Materials and Methods

### FAS and TGFBR2 Expression Via Flow Cytometry

[0876] Reduction of FAS and TGFBR2 in T cells engineered to express an shRNA module targeting different genes alone or in combination was determined via flow cytometry by staining with anti-CD95 (FAS) FITC antibody and an anti-TGFβ receptor II PE antibody and analyzed on an Attune N×T Flow Cytometer. Expression in transgene positive T cells (e.g., T cells comprising the PrimeR/CAR and shRNA module insert) was compared to transgene negative T cells (e.g., T cells without the PrimeR/CAR and shRNA module insert) to generate a total percentage of reduction. % Reduction (flow) was calculated using the formula: 1-(CD95/TGFBR2 gMFI of PrimeR+/CD95/TGFBR2 gMFI of PrimeR−)*100. Data are presented as the mean±standard deviation averaged across 4 donors.

### PTPN2 Expression Via Western Blot Analysis

[0877] Engineered logic gate (LG) T cells expressing an shRNA module targeting different genes alone or in combination were enriched via magnetic-bead based column enrichment to obtain a pure transgene-positive (PrimeR/CAR and shRNA module insert positive) fraction using an anti-Whitlow linker Alexa Fluor 647 antibody and anti-Cy5/anti-alexa fluor 647 MicroBeads. A pure transgene-negative (PrimeR/CAR and shRNA module insert negative) fraction was also obtained by depleting any transgene-positive cells from using the same magnetic-bead based column enrichment. Both populations of edited T cells were then lysed and heated to reduce and denature proteins. Total protein was quantified using the Pierce BCA Protein Assay Kit. Normalized lysates were then loaded into an SDS-PAGE gel and run. Protein was transferred from the gel to a PVDF membrane, blocked, and stained for β-actin (control) or PTPN2 primary antibody and HRP conjugated secondary antibody. The blot was imaged with the Bio-Rad ChemiDoc and relative PTPN2 expression quantified. PTPN2% Reduction (WB) was calculated using the formula: 1−(adjusted volume intensity of PrimeR+/adjusted volume intensity of PrimeR−)*100. Data are presented as the mean±standard deviation averaged across 4 donors.

### Cytotoxicity Assays

[0878] Engineered LG T cells were co-cultured with target cells at varying E:T ratios (1:1, 1:3, 1:9, 1:27, 1:81, and 1:243) for 72 hours at 37° C. Following incubation, cytotoxicity was measured using a luciferase reporter assay. The engineered logic gate T cells comprised the expression module coding for the indicated combination of SLC34A2 priming receptors and TMPRSS4 CARs as shown in Table 25 and the FAS/PTPN2/TGFBR2/TGFBR2 quad shRNA module (SEQ ID NO: 1252 or 972), unless otherwise indicated. Logic gate T cells comprising the indicated SLC34A2 priming receptors and TMPRSS4 CARs, and a control Luc/Luc/Luc/Luc quad shRNA are denoted as “quad Luc shRNA”. Data are presented as the mean±standard deviation of 3 donors.

### CAR Kinetics Assay

[0879] For the CAR “ON” kinetics, engineered LG T cells were enriched via magnetic-bead based column enrichment, to obtain a pure transgene-positive fraction using an anti-Whitlow linker Alexa Fluor 647 antibody and anti-Cy5/anti-alexa fluor 647 MicroBeads. Samples were rested for 72 hours. Enriched engineered LG T cells were cultured with either engineered 786-O cell lines that were negative for the priming antigen SLC34A2 or positive for SLC34A2 at an E:T ratio of 1:10. Co-cultures occurred in a 24-well tissue culture plate and standard T cell media supplemented with IL-7 and IL-15, and induced for 96 hours. Every 24 hours, co-cultures were harvested and T-cells were stained for PrimeR and CAR expression using an anti-Whitlow linker Alexa Fluor 647 antibody and an anti-G4S linker PE antibody and analyzed by flow cytometry on an Attune N×T. % CAR induction was calculated using the formula: 100%*(total CAR in SLC34A2 cell line (Q1⁺Q2)/total PrimeR in parental cell line (Q2⁺Q3)). CAR MFI was determined by gating on Live, GFP−, CAR+ cells.

[0880] For CAR “OFF” kinetics, enriched engineered LG T cells were cultured with engineered 786-O cell lines that were positive for SLC34A2 at an E:T ratio of 1:10. Cells were cultured in standard T cell media supplemented with IL-7 and IL-15 and were induced for 96 hours. The co-cultured samples were depleted for target cells via magnetic-bead based column enrichment using anti-SLC34A2 PE and anti-PE MicroBeads to obtain a pure population of engineered LG T cells. After removal from priming antigen, the cells were cultured in standard T cell media supplemented with IL-7 and IL-15 for 168 hours with measurements evaluating CAR expression at 24, 48, 72, 96 and 168 hours. Every 24 hours, cultures were harvested and T-cells were stained for PrimeR and CAR expression using an anti-Whitlow linker Alexa Fluor 647 antibody and an anti-G4S linker PE antibody and analyzed by flow cytometry on an Attune N×T.

### Long-Term Repetitive Stimulation Assay (RSA)

[0881] For long term cytotoxicity assays, engineered LG T cells were enriched via magnetic-bead based column enrichment, to obtain a pure transgene-positive fraction using an anti-Whitlow linker Alexa Fluor 647 antibody and anti-Cy5/anti-alexa fluor 647 MicroBeads Samples were then left to rest for 48 hours. Engineered LG T cells and RNP controls were co-cultured with 10,000 H1975 target cells engineered to express SLC34A2 and TMPRSS4 at 1:3 Effector: Target (E:T) ratio, at 37° C. Every 3-4 days, half of the cell culture was removed and replated with 10,000 target cells. Co-culture was terminated at 14 days after the initial target cell challenge. Cell cultures were imaged using Incucyte and target cell killing was determined by measuring the fluorescence intensity of GFP signal engineered to express in target cells. Data are presented as mean and SEM of 3 donors.

### Priming Antigen Heterogeneity Cytotoxicity Assay

[0882] Engineered LG T cells were co-cultured with 7500 H1975-EFG-SLC34A2/TMPRSS4 and H1975-EFG-TMPRSS4 cells mixed at various ratios to model different levels of priming antigen heterogeneity (ratios used were 100:0, 85:15, 50:50, 5:95, and 0:100 SLC34A2/TMPRSS4: TMPRSS4 cells) as well as different E:T ratios (1:1, 1:3, and 1:9) with the LG T cells. T cells expressing a constitutive CAR with the TPMRSS4 Ab48 binder were also incubated with the heterogeneous target cell populations as a positive control. After 72 hours at 37° C., cytotoxicity was measured using a luciferase reporter assay. Data are presented as the mean±standard deviation of 3 donors.

### Transpriming Assay

[0883] Engineered LG T cells were cultured with a mixture of 786-O cells expressing SLC34A2 and 293T cells expressing either WT TMPRSS4 or D290A TMPRSS4 at a 1:1:1 ratio. The expression level of WT and D290A TMPRSS4-positive 293 Ts were matched by flow cytometry to ensure equivalent expression. Supernatant from these cultures were harvested at 72 hrs and levels of IFN-γ were determined using a Lumit Immuno-assay. The % difference in IFNγ produced between the TMPRSS4 cell lines was calculated by using the formula: 100*((IFNγ WT-IFNγ D290A)/(IFNγ D290a)). Data are presented as the average of 3 technical replicates±standard deviation for each of three donor.

### Results

[0884] Five logic gates and shRNA module combinations were selected for in vitro characterization (FIG. 24). To characterize the shRNA module of the LG 239, LG 39, LG43, LG47, and LG219 T cell circuits, relative expression of FAS, PTPN2 and TGFBR2 was measured via flow or western blot and % reduction was quantified. Representative histograms of both FAS and TGFBR2 reduction are shown in FIG. 26A. Transgene-negative T cells lacking the Logic Gate and shRNA expression insert (PrimeR−, right peak) showed higher levels of FAS and TGFBR2 expression compared to transgene-positive T cells comprising the Logic Gate and shRNA expression insert (PrimeR+, left peak), indicating that the FAS and TGFBR2 shRNA expressed in the LG T cells reduced FAS and TGFBR2 expression in the T cells. FIG. 26B shows a Western blot image of PTPN2 in transgene-positive and transgene-negative cells from one donor. Transgene-negative samples had a prominent band at 42 kDa corresponding with presence of PTPN2, whereas transgene-positive samples had only a faint band present at the same size, indicating reduction of PTPN2 protein expression in transgene-positive T cells. Unedited cells (RNP) were included as a negative control. FIG. 26C provides quantification of the reduced FAS, TGFBR2 and PTPN2 expression as an average of 3 donors with standard deviation. As shown in FIG. 26C, FAS expression was reduced approximately 80%, TGFBR2 expression was reduced approximately 70% and PTPN2 expression was reduced approximately 95% in the T cells expressing the quad FAS, PTPN2 and 2xTGFBR2 shRNA (SEQ ID NO: 1252). Thus, each of the LG T cell constructs tested showed knockdown of FAS, PTPN2 and TGFBR2 gene expression.

[0885] The cytolytic activity of the selected LG T cells were evaluated by co-culturing the T cells with cell lines H1648 or H2347 that endogenously express TMPRSS4 and SLC34A2, and the H1975-SLC34A2/TMPRSS4 cell line engineered to express median levels of both target antigens as observed in primary human tumors as scored by IHC. After 72 hours at 37° C., cytotoxicity was measured using a luciferase reporter assay. Engineered LG T cells targeting SLC34A2 and TMPRSS4 demonstrated potent on-target cytotoxicity against all three dual antigen cell lines (FIG. 27A, FIG. 27B and FIG. 27C). Background cytotoxicity was observed from the negative control RNP-only T cells. Thus, all the selected LG T cells killed indication-specific, dual-antigen cell lines expressing SLC34A2 and TMPRSS4 antigens at and below tumor-relevant levels.

[0886] IFNγ production was observed by engineered LG 47 and LG 39 T cells after incubation with both the TMPRSS4 WT and TMPRSS4 D290A cell lines, in T cells engineered from 3 donors (FIG. 28). IFNγ secretion was comparable between cultures with WT or D290A TMPRSS4 for both LG 47 and LG 39 across the three donors tested.

[0887] To show that CAR induction in engineered LG T cells occurred in a priming antigen dependent manner (e.g., after contacting a SLC34A2 antigen), an ON/OFF kinetics assay was developed. The CAR kinetics assay demonstrated that all engineered LG T cells cultured with cell lines that expressed the SLC34A2 priming antigen achieved over a 70% CAR induction by 96 hours post onset of induction (FIG. 29B). FIG. 29A shows a representative flow plot of the engineered LG T-cells co-cultured with a parental cell line (left) and an SLC34A2 positive cell line (right). CAR expression was detected only in the context of the SLC34A2-expressing cell line indicating that antigen binding of the priming receptor to its cognate ligand drove CAR expression. FIG. 29C shows representative flow plots of engineered LG T cells removed from priming antigen in an “ON” state (e.g., after incubation with cells expressing SLC34A2) and an “OFF” state (e.g., after incubation with cells that did not express SLC34A2). After removal from the priming antigen, the percent CAR expression (left panel) and CAR mean fluorescent intensity (MFI, right panel) decreased over time, reaching a minimum at around 96 hours (FIG. 29D). Therefore, all selected LG T cells demonstrated SLC34A2-dependent CAR expression induction and rapid loss of CAR expression upon removal of the priming antigen.

[0888] A repetitive stimulation assay (RSA) was also performed, to determine if the efficacy of the engineered LG T cells could be maintained over repeated stimulation with target antigen. The LG T cells maintained long term cytotoxic efficacy against the H1975-SLC34A2/TMPRSS4 target line at 1:3 E:T in the RSA, as compared to the RNP control (FIG. 30).

[0889] To assess the minimum proportion of prime antigen positive cells necessary to induce target cell killing by the engineered LG T cells, a cytotoxicity assay was developed in which tumor antigen heterogeneity was controlled by mixing target cells H1975-EFG-SLC34A2/TMPRSS4 and H1975-EFG-TMPRSS4 at defined ratios (100:0, 85:15, 50:50, 5:95, and 0:100 SLC34A2/TMPRSS4: TMPRSS4 cells). Heterogenous target cell populations were also incubated with LG T cells as different ratios (E:T ratios (1:1, 1:3, and 1:9). A T cell expressing a constitutive TMPRSS4 CAR comprising an Ab48 extracellular domain was used as a positive control. FIG. 31A shows the % target killing at a 1:1 E:T ratio. FIG. 31B shows the % target killing at a 1:3 E:T ratio. FIG. 31C shows the % target killing at a 1:9 E:T ratio. The constitutive CAR control T cells killed all TMPRSS4 positive target cell conditions equally well regardless of SLC34A2 expression. Only background cytotoxicity was observed from the negative control RNP-only T cells. The priming antigen heterogeneity cytotoxicity assay demonstrated that logic gate T cells were capable of eliminating heterogenous populations of cancer cells that express the priming antigen on only a small minority of cells.

### Example 7: In Vivo Characterization of TMPRSS4 CAR and SLC34A2 Priming Receptor Logic Gate T Cells

### Materials and Methods

### In Vivo Xenograft Tumor Model

[0890] To establish an indication-specific lung adenocarcinoma (LUAD) xenograft model, H1975 tumor cells were engineered to express TMPRSS4 and SLC34A2. The H1975-SLC34A2/TMPRSS4 cells were implanted subcutaneously in one flank of NSG MHC I/II double-knockout (NSG-DKO) mice and allowed to grow to palpable tumors of 150 mm³ volume. Engineered LG T-cells or RNP cells were then infused into mice via the tail vein by IV administration (n=7 mice per group) at a dose of 2.5×10⁶ edited cells. Progression in tumor volume was measured using a caliper twice per week. Data are presented as the mean±standard error of the mean (SEM) of 7 mice per test group

### In Vivo Dual Flank Subcutaneous Xenograft Tumor Model

[0891] For a dual flank lung adenocarcinoma H1975 subcutaneous xenograft model, H1975 cells expressing TMPRSS4 only (H1975-TMPRSS4) and H1975 cells expressing TMPRSS4 and SLC34A2 (H1975-SLC34A2/TMPRSS4) were subcutaneously injected in contralateral flanks of NSG MHC I/II DKO mice. When the H1975 tumors reached mean tumor volume of 150 mm³, tumor-bearing animals were randomized and injected intravenously with a single dose of 2.5×10⁶ of selected engineered LG (LG 239, LG 39, LG 43, LG47, and LG 219) comprising the quad FAS/PTNP2/2xTGFBR2 shRNA module (SEQ ID NO: 1252), RNP or a constitutive TMPRSS4 CAR with the TPMPRSS4 Ab48 extracellular binding domain T cells. Progression in tumor volume was measured using a caliper twice per week. Data are presented as the mean±standard error of the mean (SEM) of 7 mice per test group.

### Results

[0892] As shown in FIG. 32, all engineered LG T cells demonstrated tumor-growth inhibition at a dose of 2.5×10⁶ cells in the single flank subcutaneous in vivo assay. Three of the five LG T cells (LG 239, LG 39, LG 47) also showed prolonged tumor control (>20 days post T cell injection). By day 10 post T cell injection, mice that received the 2.5×10⁶ dose of the engineered LG T cells achieved anti-tumor effect as defined by reduced tumor volume, compared to mice infused with RNP negative control cells. Thus, engineered LG T cells successfully inhibited growth of H1975-nEFG-SLC43A2-TMPRSS4 non-small cell lung carcinoma tumors in vivo. In addition, LG 47, LG 39, and LG 239 showed the most potent tumor control in this in vivo efficacy study.

[0893] For in vivo specificity, engineered LG T cells, RNP and constitutive CAR T cells were injected into mice bearing two distinct tumors on contralateral flanks. H1975-TMPRSS4 cells were injected into one flank and H1975-TMPRSS4-SLC34A2 cells were injected into the other flank. The LG T cells demonstrated specific tumor growth inhibition against the H1975 SLC34A2-TMPRSS4 expressing tumors (FIG. 33A) but showed minimal impact on the growth of the H1975 TMPRSS4-only expressing tumors (FIG. 33B). LG 47 and LG 239 demonstrated the highest specificity, while LG 47 and LG 39 showed superior on-target response.

[0894] T cells expressing the constitutive CAR demonstrated anti-tumor effect on both tumors, confirming the non-specific activity of the CAR as a positive control. In addition, the constitutive CAR T cells initially triggered a tumor response in both on-target and off-target tumors, but lost tumor control over time.

[0895] The selected engineered LG T cells demonstrated specific killing of tumors expressing both the priming antigen (SLC34A2) and the cytolytic antigen (TMPRSS4). In addition, the selected LG T cells showed minimal cytolytic effect on the tumors that only expressed TMPRSS4, which were a surrogate for healthy tissues that express TMPRSS4 only. Without wishing to be bound by theory, this demonstrated the functionality and mechanism of action of the sequential AND gate employed in the engineered LG T cells.

### Example 8: In Vitro and In Vivo Characterization of shRNA Modules in TMPRSS4 CAR and SLC34A2 Priming Receptor Logic Gate T Cells

### Materials and Methods

### In Vitro Assays

[0896] To characterize the impact of shRNA knockdown of individual gene targets on the LG T cells, engineered LG T cells expressing a control shRNA module comprising a quad luciferase shRNA (Luc/Luc/Luc/Luc, quad luc) as a negative control or shRNA modules individually targeting FAS, PTPN2, or TGFBR2. The new LG T cells were characterized and compared to T cells comprising the full quad FAS/PTPN2/TGFBR2/TGFBR2 shRNA module (SEQ ID NO: 1252) as described in Example 6. In particular, the % knock down of gene expression of FAS, PTPN2, and TGFBR2 was assessed by flow cytometry and cytotoxicity and proliferation of LG 47 T cells in the repeat stimulation assay (RSA) using K562-SLC34A2/TMPRSS4 D290A cells was characterized. In the RSA assay, exogenous human IL-2 cytokine (50 U/mL) was added to the media.

[0897] In addition, a H1975-SLC34A2/TMPRSS4 engineered cell line was engineered to knockout FAS expression and overexpress FAS ligand (FASL) (H1975-SLC34A2/TMPRSS4-FasKO-FasL). This cell line was used in the RSA assay as described in Example 6. FIG. 34C shows a histogram of FAS and FASL expression in the double knock out cell line H1975-SLC34A2/TMPRSS4-FasKO-FasL, compared to FAS and FASL expression in cells with only a FAS knock out (H1975-SLC34A2/TMPRSS4-FasKO), the double KO cells treated with bastimastat, and the engineered parental cell line H1975-SLC34A2/TMPRSS4.

pSMAD Assay

[0898] Engineered LG T cells comprising the full shRNA module, the 2xTGFBR2 shRNA module, or the quad luc shRNA module were incubated in the presence and absence of 5 ng/ml TGFb for 72 hours. T cells were harvested for quantification of phosphorylated SMAD (pSMAD). pSMAD levels were determined via FACS and quantified as the geometric MFI (gMFI).

### In Vivo Assays

[0899] The LG 47 T cells comprising the full shRNA module and the quad luc shRNA module were tested in vivo using the H1975 xenograft tumor model described in Example 7, with the exception of dosing the mice with 5×10⁶ (FIG. 37) LG T cells.

### Results

[0900] FIG. 34A shows the % reduction of FAS in engineered LG T cells by flow cytometry. FAS knock down (KD) was observed only in T cells containing a FAS shRNA (e.g., the full shRNA module or the individual FAS shRNA module). FIG. 34B shows the in vitro functional effects of downregulating FAS in T cells incubated with target cells overexpressing FASL and no FAS (H1975-SLC34A2/TMPRSS4-FasKO-FasL). The FAS KD T cells (full shRNA and FAS shRNA) showed improved tumor control as compared to the non-targeting control (quad luc) shRNA T cells over repeated stimulations. Taken together and without wishing to be bound by theory, the data suggest that FAS shRNA knockdown enhanced cytotoxicity in the setting of FASL overexpression.

[0901] Next, the effects of targeting only the PTPN2 gene were assessed. FIG. 35A shows that shRNA knockdown of PTPN2 enhances T cell cytotoxicity against the target cells and maintained T cell proliferation over time in a repetitive stimulation assay. T cell proliferation of each of the LG T cell lines tested in the RSA is shown in FIG. 35B. The LG T cells expressing the PTPN2 shRNA proliferated while the LG T cells expressing only the control non-targeting quad luc shRNA did not.

[0902] Finally, the effect of downregulation of TGFBR2 on the T cell activity was assessed. FIG. 36A shows % reduction of TGFBR2 by flow cytometry. TGFBR2 knock down (KD) was seen only in the LG T cells comprising a TGFBR2 shRNA (full shRNA module, far left bar and TGFBR2 module, far right bar). FIG. 36B shows that in the presence of exogenous TGFβ, the T cells with a TGFBR2 KD (full shRNA module, middle bar, or TGFBR2 shRNA, right bar) had reduced phosphorylated SMAD as compared to the T cells with the control non-targeting quad luc shRNA (left bar). FIG. 36C shows the in vitro functional effects of TGFBR2 downregulation in the RSA. LG T cells showed effective tumor control after repetitive stimulation when TGFBR2 was knocked down, e.g., in the LG 47 T cells expressing the full shRNA or the TGFBR2 shRNA, but not in the non-targeting quad luc shRNA T cells. Thus, TGFBR2 shRNA knockdown in the LG 47 T cells enhanced T cell cytotoxicity of the LG T cells in the presence of TGFβ-mediated suppression in vitro.

[0903] The in vivo H1975 mouse model was also used to assess the effect of the shRNA modules on the function of the LG T cells. The LG 47 T cells comprising the non-targeting control quad luc shRNA had decreased ability to inhibit tumor growth as compared to LG 47 T cells comprising the FAS/PTPN2/TGFBR2/TGFBR2 quad shRNA (FIG. 37). Thus, FAS/PTPN2/TGFBR2 shRNA knockdown in the LG 47 T cells enhanced the T cell cytotoxicity against tumor cells in vivo.

[0904] While the invention has been particularly shown and described with reference to a preferred embodiment and various alternate embodiments, it will be understood by persons skilled in the relevant art that various changes in form and details can be made therein without departing from the spirit and scope of the invention.

[0905] All references, issued patents and patent applications cited within the body of the instant specification are hereby incorporated by reference in their entirety, for all purposes.

TABLE 27
Additional Sequences

| Name and SEQ ID | |
|---|---|
| NO | Sequence |
| SLC34A2 peptide | INVTVPSTANCTSPSLCWTDGIQNWTMK |
| fragment | |
| SEQ ID NO: 1149 | |
| SLC34A2 peptide | INVTVPSTANCTSPSLCWTDGIQNWTMKC |
| fragment with C | |
| terminal cysteine | |
| SEQ ID NO: 1150 | |
| KLH | MLSVRLLIVVLALANAENLVRKSVEHLTQEETLDLQAALRELQMDSSSIGFQKIAAAHGA |
| SEQ ID NO: 1151 | PASCVHKDTSIACCIHGMPTFPHWHRAYVVHMERALQTKRRTSGLPYWDWTEPITQLPSL |
| | AADPVYIDSQGGKAHTNYWYRGNIDFLDKKTNRAVDDRLFEKVKPGQHTHLMESVLDALE |
| | QDEFCKFEIQFELAHNAIHYLVGGKHDYSMANLEYTAYDPIFFLHHSNVDRIFAIWQRLQ |
| | ELRNKDPKAMDCAQELLHQKMEPFSWEDNDIPLTNEHSTPADLFDYCELHYDYDTLNLNG |
| | MTPEELKTYLDERSSRARAFASFRLKGFGGSANVFVYVCIPDDNDRNDDHCEKAGDFFVL |
| | GGPSEMKWQFYRPYLFDLSDTVHKMGMKLDGHYTVKAELFSVNGTALPDDLLPHPVVVHH |
| | PEKGFTDPPVKHHQSANLLVRKNINDLTREEVLNLREAFHKFQEDRSVDGYQATAEYHGL |
| | PARCPRPDAKDRYACCVHGMPIFPHWHRLFVTQVEDALVGRGATIGIPYWDWTEPMTHIP |
| | GLAGNKTYVDSHGASHTNPFHSSVIAFEENAPHTKRQIDQRLFKPATFGHHTDLFNQILY |
| | AFEQEDYCDFEVQFEITHNTIHAWTGGSEHFSMSSLHYTAFDPLFYFHHSNVDRLWAVWQ |
| | ALQMRRHKPYRAHCAISLEHMHLKPFAFSSPLNNNEKTHANAMPNKIYDYENVLHYTYED |
| | LTFGGISLENIEKMIHENQQEDRIYAGFLLAGIRTSANVDIFIKTTDSVQHKAGTFAVLG |
| | GSKEMKWGFDRVFKFDITHVLKDLDLTADGDFEVTVDITEVDGTKLASSLIPHASVIREH |
| | ARVKFDKVPRSRLIRKNVDRLSPEEMNELRKALALLKEDKSAGGFQQLGAFHGEPKWCPS |
| | PEASKKFACCVHGMSVFPHWHRLLTVQSENALRRHGYDGALPYWDWTSPLNHLPELADHE |
| | KYVDPEDGVEKHNPWFDGHIDTVDKTTTRSVQNKLFEQPEFGHYTSIAKQVLLALEQDNF |
| | CDFEIQYEIAHNYIHALVGGAQPYGMASLRYTAFDPLFYLHHSNTDRIWAIWQALQKYRG |
| | KPYNVANCAVTSMREPLQPFGLSANINTDHVTKEHSVPFNVFDYKTNFNYEYDTLEFNGL |
| | SISQLNKKLEAIKSQDRFFAGFLLSGFKKSSLVKFNICTDSSNCHPAGEFYLLGDENEMP |
| | WAYDRVFKYDITEKLHDLKLHAEDHFYIDYEVFDLKPASLGKDLFKQPSVIHEPRIGHHE |
| | GEVYQAEVTSANRIRKNIENLSLGELESLRAAFLEIENDGTYESIAKFHGSPGLCQLNGN |
| | PISCCVHGMPTFPHWHRLYVVVVENALLKKGSSVAVPYWDWTKRIEHLPHLISDATYYNS |
| | RQHHYETNPFHHGKITHENEITTRDPKDSLFHSDYFYEQVLYALEQDNFCDFEIQLEILH |
| | NALHSLLGGKGKYSMSNLDYAAFDPVFFLHHATTDRIWAIWQDLQRFRKRPYREANCAIQ |
| | LMHTPLQPFDKSDNNDEATKTHATPHDGFEYQNSFGYAYDNLELNHYSIPQLDHMLQERK |
| | RHDRVFAGFLLHNIGTSADGHVFVCLPTGEHTKDCSHEAGMFSILGGQTEMSFVEDRLYK |
| | LDITKALKKNGVHLQGDFDLEIEITAVNGSHLDSHVIHSPTILFEAGTDSAHTDDGHTEP |
| | VMIRKDITQLDKRQQLSLVKALESMKADHSSDGFQAIASFHALPPLCPSPAASKRFACCV |
| | HGMATFPQWHRLYTVQFQDSLRKHGAVVGLPYWDWTLPRSELPELLTVSTIHDPETGRDI |
| | PNPFIGSKIEFEGENVHTKRDINRDRLFQGSTKTHHNWFIEQALLALEQTNYCDFEVQFE |
| | IMHNGVHTWVGGKEPYGIGHLHYASYDPLFYIHHSQTDRIWAIWQSLQRFRGLSGSEANC |
| | AVNLMKTPLKPFSFGAPYNLNDHTHDFSKPEDTEDYQKFGYIYDTLEFAGWSIRGIDHIV |
| | RNRQEHSRVFAGFLLEGFGTSATVDFQVCRTAGDCEDAGYFTVLGGEKEMPWAFDRLYKY |
| | DITETLDKMNLRHDEIFQIEVTITSYDGTVLDSGLIPTPSIIYDPAHHDISSHHLSLNKV |
| | RHDLSTLSERDIGSLKYALSSLQADTSADGFAAIASFHGLPAKCNDSHNNEVACCIHGMP |
| | TFPHWHRLYTLQFEQALRRHGSSVAVPYWDWTKPIHNIPHLFTDKEYYDVWRNKVMPNPF |
| | ARGYVPSHDTYTVRDVQEGLFHLTSTGEHSALLNQALLALEQHDYCDFAVQFEVMHNTIH |
| | YLVGGPQVYSLSSLHYASYDPIFFIHHSFVDKVWAVWQALQEKRGLPSDRADCAVSLMTQ |
| | NMRPFHYEINHNQFTKKHAVPNDVFKYELLGYRYDNLEIGGMNLHEIEKEIKDKQHHVRV |
| | FAGFLLHGIRTSADVQFQICKTSEDCHHGGQIFVLGGTKEMAWAYNRLFKYDITHALHDA |
| | HITPEDVFHPSEPFFIKVSVTAVNGTVLPASILHAPTIIYEPGLDHHEDHHSSSMAGHGV |
| | RKEINTLTTAEVDNLKDAMRAVMADHGPNGYQAIAAFHGNPPMCPMPDGKNYSCCTHGMA |
| | TFPHWHRLYTKQMEDALTAHGARVGLPYWDGTTAFTALPTFVTDEEDNPFHHGHIDYLGV |
| | DTTRSPRDKLENDPERGSESFFYRQVLLALEQTDFCQFEVQFEITHNAIHSWTGGLTPYG |
| | MSTLEYTTYDPLFWLHHANTDRIWAIWQALQEYRGLPYDHANCEIQAMKRPLRPFSDPIN |
| | HNAFTHSNAKPTDVFEYSRFNFQYDNLRFHGMTIKKLEHELEKQKEEDRTFAAFLLHGIK |
| | KSADVSFDVCNHDGECHFAGTFAILGGEHEMPWSFDRLFRYDITQVLKQMHLEYDSDFTF |
| | HMRIIDTSGKQLPSDLIKMPTVEHSPGGKHHEKHHEDHHEDILVRKNIHSLSHHEAEELR |
| | DALYKLQNDESHGGYEHIAGFHGYPNLCPEKGDEKYPCCVHGMSIFPHWHRLHTIQFERA |
| | LKKHGSHLGIPYWDWTQTISSLPTFFADSGNNNPFFKYHIRSINQDTVRDVNEAIFQQTK |
| | FGEFSSIFYLALQALEEDNYCDFEVQYEILHNEVHALIGGAEKYSMSTLEYSAFDPYFMI |
| | HHASLDKIWIIWQELQKRRVKPAHAGSCAGDIMHVPLHPFNYESVNNDDFTRENSLPNAV |
| | VDSHRFNYKYDNLNLHGHNIEELEEVLRSLRLKSRVFAGFVLSGIRTTAVVKVYIKSGTD |
| | SDDEYAGSFVILGGAKEMPWAYERLYRFDITETVHNLNLTDDHVKFRFDLKKYDHTELDA |
| | SVLPAPIIVRRPNNAVEDIIEIPIGKDVNLPPKVVVKRGTKIMFMSVDEAVTTPMLNLGS |
| | YTAMFKCKVPPFSFHAFELGKMYSVESGDYFMTASTTELCNDNNLRIHVHVDDE |
| SLC34A2 | VEVATHYLEIITQLIVESFHFKNGEDAPDLLKVITKPFTKLIVQLDKKVISQIAMNDEKA |
| recombinant | KNKSLVKIWCKTFTNKTQINVTVPSTANCTSPSLCWTDGIQNWTMKNVTYKENIAKCQHI |
| fusion protein | FVNFHLPDLGSAAAEPRSPTIKPCPPCKCPAPNLEGGPSVFIFPPKIKDVLMISLSPIVT |
| SEQ ID NO: 1152 | CVVVDVSEDDPDVQISWFVNNVEVHTAQTQTHREDYNSTLRVVSALPIQHQDWMSGKAFA |
| | CAVNNKDLPAPIERTISKPKGSVRAPQVYVLPPPEEEMTKKQVTLTCMVTDEMPEDIYVE |
| | WTNNGKTELNYKNTEPVLDSDGSYFMYSKLRVEKKNWVERNSYSCSVVHEGLHNHHTTKS |
| | FSRTPGK |
| SLC34A2 ECL2 | VEVATHYLEIITQLIVESFHFKNGEDAPDLLKVITKPFTKLIVQLDKKVISQIAMNDEKA |
| SEQ ID NO: 1119 | KNKSLVKIWCKTFTNKTQINVTVPSTANCTSPSLCWTDGIQNWTMKNVTYKENIAKCQHI |
| | FVNFHLPDL |
| Murine Fc domain | EPRSPTIKPCPPCKCPAPNLEGGPSVFIFPPKIKDVLMISLSPIVTCVVVDVSEDDPDVQ |
| SEQ ID NO: 1153 | ISWFVNNVEVHTAQTQTHREDYNSTLRVVSALPIQHQDWMSGKAFACAVNNKDLPAPIER |
| | TISKPKGSVRAPQVYVLPPPEEEMTKKQVTLTCMVTDFMPEDIYVEWTNNGKTELNYKNT |
| | EPVLDSDGSYFMYSKLRVEKKNWVERNSYSCSVVHEGLHNHHTTKSFSRTPGK |
| Constant heavy | ASTKGPSVFPLAPSSKSTSGGTAALGCLVKDYFPEPVTVSWNSGALTSGVHTFPAVLQSS |
| chain IgG1 | GLYSLSSVVTVPSSSLGTQTYICNVNHKPSNTKVDKRVEPKSCDKTHTCPPCPAPELLGG |
| SEQ ID NO: 1247 | PSVFLFPPKPKDTLMISRTPEVTCVVVDVSHEDPEVKFNWYVDGVEVHNAKTKPREEQYN |
| | STYRVVSVLTVLHQDWLNGKEYKCKVSNKALPAPIEKTISKAKGQPREPQVYTLPPSREE |
| | MTKNQVSLTCLVKGFYPSDIAVEWESNGQPENNYKTTPPVLDSDGSFFLYSKLTVDKSRW |
| | QQGNVFSCSVMHEALHNHYTQKSLSLSPG |
| Constant light | RTVAAPSVFIFPPSDEQLKSGTASVVCLLNNFYPREAKVQWKVDNALQSGNSQESVTEQD |
| kappa chain | SKDSTYSLSSTLTLSKADYEKHKVYACEVTHQGLSSPVTKSENRGEC |
| SEQ ID NO: 1248 | |
| ECL-mFc fusion | VEVATHYLEIITQLIVESFHFKNGEDAPDLLKVITKPFTKLIVQLDKKVISQIAMNDEKA |
| protein | KNKSLVKIWCKTFTNKTQINVTVPSTANCTSPSLCWTDGIQNWTMKNVTYKENIAKCQHI |
| SEQ ID NO: 1249 | FVNFHLPDLGSAAAEPRSPTIKPCPPCKCPAPNLEGGPSVFIFPPKIKDVLMISLSPIVT |
| | CVVVDVSEDDPDVQISWFVNNVEVHTAQTQTHREDYNSTLRVVSALPIQHQDWMSGKAFA |
| | CAVNNKDLPAPIERTISKPKGSVRAPQVYVLPPPEEEMTKKQVTLTCMVTDFMPEDIYVE |
| | WTNNGKTELNYKNTEPVLDSDGSYFMYSKLRVEKKNWVERNSYSCSVVHEGLHNHHTTKS |
| | FSRTPG |

1. A system comprising:
a. a first chimeric polypeptide comprising a priming receptor comprising a first antigen-binding domain that specifically binds to Solute Carrier Family 34 Member 2 (SLC34A2) (SEQ ID NO: 962); and
b. a second chimeric polypeptide comprising a chimeric antigen receptor (CAR) comprising a second antigen-binding domain that specifically binds to Transmembrane protease, serine 4 (TMPRSS4) (SEQ ID NO: 960).

2.-11. (canceled)

12. The system of claim 1, comprising at least one or more nucleic acids comprising a nucleic acid sequence at least 15 nucleotides in length complementary to a portion thereof of:
a. a nucleic acid encoding human Fas Cell Surface Death Receptor (FAS) comprising the sequence set forth in SEQ ID NO: 964; and/or
b. a nucleic encoding human Transforming Growth factor (TGF)-β Receptor 2 (TGFBR2) comprising the sequence set forth in SEQ ID NO: 965; and/or
c. a nucleic acid encoding Phosphatase Non-Receptor Type 2 (PTPN2) comprising the sequence set forth in SEQ ID NO: 966.

13.-70. (canceled)

71. One or more nucleic acids comprising at least one nucleic acid fragment comprising a nucleotide sequence encoding the system of claim 1.

72. The nucleic acid(s) of claim 71, comprising a sequence with at least 80%, 85%, 90%, 91%, 92%, 93%, 94%, 95%, 96%, 97%, 98%, 99%, or 100% identity to a sequence as set forth in SEQ ID NO: 1238; a sequence with at least 80%, 85%, 90%, 91%, 92%, 93%, 94%, 95%, 96%, 97%, 98%, 99%, or 100% identity to a sequence as set forth in SEQ ID NO: 1239; a sequence with at least 80%, 85%, 90%, 91%, 92%, 93%, 94%, 95%, 96%, 97%, 98%, 99%, or 100% identity to a sequence as set forth in SEQ ID NO: 1240; a sequence with at least 80%, 85%, 90%, 91%, 92%, 93%, 94%, 95%, 96%, 97%, 98%, 99%, or 100% identity to a sequence as set forth in SEQ ID NO: 1241; a sequence with at least 80%, 85%, 90%, 91%, 92%, 93%, 94%, 95%, 96%, 97%, 98%, 99%, or 100% identity to a sequence as set forth in SEQ ID NO: 1242; at least 80%, 85%, 90%, 91%, 92%, 93%, 94%, 95%, 96%, 97%, 98%, 99%, or 100% identity to a sequence comprising nucleotides 481-7257 of SEQ ID NO: 1120; a sequence with at least 80%, 85%, 90%, 91%, 92%, 93%, 94%, 95%, 96%, 97%, 98%, 99%, or 100% identity to a sequence comprising nucleotides 481-7239 of SEQ ID NO: 1121; a sequence with at least 80%, 85%, 90%, 91%, 92%, 93%, 94%, 95%, 96%, 97%, 98%, 99%, or 100% identity to a sequence comprising nucleotides 481-7621 of SEQ ID NO: 1122; a sequence with at least 80%, 85%, 90%, 91%, 92%, 93%, 94%, 95%, 96%, 97%, 98%, 99%, or 100% identity to a sequence comprising nucleotides 481-7636 of SEQ ID NO: 1123; or a sequence with at least 80%, 85%, 90%, 91%, 92%, 93%, 94%, 95%, 96%, 97%, 98%, 99%, 100% identity to a sequence comprising nucleotides 481-7621 of SEQ ID NO: 1124; a sequence with at least 80%, 85%, 90%, 91%, 92%, 93%, 94%, 95%, 96%, 97%, 98%, 99%, or 100% identity to a sequence as set forth in SEQ ID NO: 1120; a sequence with at least 80%, 85%, 90%, 91%, 92%, 93%, 94%, 95%, 96%, 97%, 98%, 99%, or 100% identity to a sequence as set forth in SEQ ID NO: 1121; a sequence with at least 80%, 85%, 90%, 91%, 92%, 93%, 94%, 95%, 96%, 97%, 98%, 99%, or 100% identity to a sequence as set forth in SEQ ID NO: 1122; a sequence with at least 80%, 85%, 90%, 91%, 92%, 93%, 94%, 95%, 96%, 97%, 98%, 99%, or 100% identity to a sequence as set forth in SEQ ID NO: 1123; a sequence with at least 80%, 85%, 90%, 91%, 92%, 93%, 94%, 95%, 96%, 97%, 98%, 99%, or 100% identity to a sequence as set forth in SEQ ID NO: 1124; a sequence with at least 80%, 85%, 90%, 91%, 92%, 93%, 94%, 95%, 96%, 97%, 98%, 99%, or 100% identity to a sequence comprising nucleotides 24-7707 of SEQ ID NO: 1120; a sequence with at least 80%, 85%, 90%, 91%, 92%, 93%, 94%, 95%, 96%, 97%, 98%, 99%, or 100% identity to a sequence comprising nucleotides 24-7689 of SEQ ID NO: 1121; a sequence with at least 80%, 85%, 90%, 91%, 92%, 93%, 94%, 95%, 96%, 97%, 98%, 99%, or 100% identity to a sequence comprising nucleotides 24-8071 of SEQ ID NO: 1122; a sequence with at least 80%, 85%, 90%, 91%, 92%, 93%, 94%, 95%, 96%, 97%, 98%, 99%, or 100% identity to a sequence comprising nucleotides 24-8086 of SEQ ID NO: 1123; or a sequence with at least 80%, 85%, 90%, 91%, 92%, 93%, 94%, 95%, 96%, 97%, 98%, 99%, or 100% identity to a sequence comprising nucleotides 24-8071 of SEQ ID NO: 1124.

73. (canceled)

74. One or more nucleic acid(s), wherein the one or more nucleic acid(s) encode:
a. a first chimeric polypeptide comprising a priming receptor comprising a first antigen-binding domain that specifically binds to human Solute Carrier Family 34 Member 2 (SLC34A2);
b. a second chimeric polypeptide comprising a chimeric antigen receptor (CAR) comprising a second antigen-binding domain that specifically binds to human Transmembrane protease, serine 4 (TMPRSS4).

75. The nucleic acid(s) of claim 74, comprising at least one nucleic acid sequence at least 15 nucleotides in length complementary to a portion thereof of:
a. a nucleic acid encoding human Fas Cell Surface Death Receptor (FAS) comprising the sequence set forth in SEQ ID NO: 964; and/or
b. a nucleic acid encoding human Transforming Growth factor (TGF)-Receptor 2 (TGFBR2) comprising the sequence set forth in SEQ ID NO: 965; and/or
c. a nucleic acid encoding Phosphatase Non-Receptor Type 2 (PTPN2) comprising the sequence set forth in SEQ ID NO: 966.

76. (canceled)

77. The nucleic acid(s) of claim 74, wherein the first antigen-binding domain comprises a heavy chain comprising a first variable heavy (VH) chain sequence comprising three heavy chain CDR sequences, CDR-H1, CDR-H2, and CDR-H3, of the VH sequences set forth in SEQ ID NOs: 1001, 1009, or 1015, and a first variable light (VL) chain sequence comprising three light chain CDR sequences, CDR-L1, CDR-L2, and CDR-L3, of the VL sequences set forth in SEQ ID NOs: 1005, 1013, 1125, or 1019, optionally wherein:
a. CDR-H1 comprises the sequence set forth in SEQ ID NO: 1002, CDR-H2 comprises the sequence set forth in SEQ ID NO: 1003, CDR-H3 comprises the sequence set forth in SEQ ID NO: 1004, CDR-L1 comprises the sequence set forth in SEQ ID NO: 1006, CDR-L2 comprises the sequence set forth in SEQ ID NO: 1007, and CDR-L3 comprises the sequence set forth in SEQ ID NO: 1008; or
b. CDR-H1 comprises the sequence set forth in SEQ ID NO: 1010, CDR-H2 comprises the sequence set forth in SEQ ID NO: 1011, CDR-H3 comprises the sequence set forth in SEQ ID NO: 1012, CDR-L1 comprises the sequence set forth in SEQ ID NO: 1006, CDR-L2 comprises the sequence set forth in SEQ ID NO: 1007, and CDR-L3 comprises the sequence set forth in SEQ ID NO: 1014; or
c. CDR-H1 comprises the sequence set forth in SEQ ID NO: 1016, CDR-H2 comprises the sequence set forth in SEQ ID NO: 1017, CDR-H3 comprises the sequence set forth in SEQ ID NO: 1018, CDR-L1 comprises the sequence set forth in SEQ ID NO: 1020, CDR-L2 comprises the sequence set forth in SEQ ID NO: 1021, and CDR-L3 comprises the sequence set forth in SEQ ID NO: 1022.

78.-80. (canceled)

81. The nucleic acid(s) of claim 74, wherein the second antigen-binding domain comprises a second variable heavy (VH) chain sequence comprising three heavy chain CDR sequences, CDR-H1, CDR-H2, and CDR-H3, of the VH sequences set forth in SEQ ID NOs: 319 or 326, and a second variable light (VL) chain sequence comprising three light chain CDR sequences, CDR-L1, CDR-L2, and CDR-L3, of the VL sequence set forth in SEQ ID NOs: 320 or 327, optionally wherein:
a. CDR-H1 comprises the sequence set forth in SEQ ID NO: 321, CDR-H2 comprises the sequence set forth in SEQ ID NO: 322, CDR-H3 comprises the sequence set forth in SEQ ID NO: 323, CDR-L1 comprises the sequence set forth in SEQ ID NO: 324, CDR-L2 comprises the sequence set forth in SEQ ID NO: 325, and CDR-L3 comprises the sequence set forth in SEQ ID NO: 16; and
b. CDR-H1 comprises the sequence set forth in SEQ ID NO: 193, CDR-H2 comprises the sequence set forth in SEQ ID NO: 80, CDR-H3 comprises the sequence set forth in SEQ ID NO: 328, CDR-L1 comprises the sequence set forth in SEQ ID NO: 329, CDR-L2 comprises the sequence set forth in SEQ ID NO: 330, and CDR-L3 comprises the sequence set forth in SEQ ID NO: 331.

82.-95. (canceled)

96. The nucleic acid(s) of claim 74, wherein the at least one or more nucleic acid sequence is encoded in at least one intron region of the nucleic acid.

97.-98. (canceled)

99. The nucleic acid(s) of claim 71, wherein the nucleic acid comprises:
(i) an inducible promoter operably linked to the nucleotide sequence encoding the CAR, wherein the inducible promoter drives the inducible expression of the CAR;
(ii) a constitutive promoter operably linked to the nucleotide sequence encoding the priming receptor, wherein the constitutive promoter drives constitutive expression of the priming receptor; or
(iii) an inducible promoter element operably linked to the nucleotide sequence encoding the CAR and a constitutive promoter operably linked to the nucleotide sequence encoding the priming receptor.

100.-112. (canceled)

113. The nucleic acid(s) of claim 71, wherein the nucleic acid comprises a 5′ homology directed repair arm and a 3′ homology directed repair arm, both of which are complementary to an insertion site in a host cell chromosome.

114.-118. (canceled)

119. A vector comprising the nucleic acid of claim 71.

120.-126. (canceled)

127. An isolated cell comprising
at least one nucleic acid of claim 71.

128. The isolated cell of claim 127, wherein the cell is an immune cell.

129. (canceled)

130. The isolated cell of claim 128, wherein the immune cell is a primary human immune cell.

131. The isolated cell of claim 130, wherein the primary immune cell is a natural killer (NK) cell, a T cell, a CD8+ T cell, a CD4+ T cell, a primary T cell, or a T cell progenitor.

132.-133. (canceled)

134. A population of isolated cells comprising a plurality of cells of claim 127.

135. A pharmaceutical composition comprising the isolated cells of claim 127, and a pharmaceutically acceptable excipient.

136. A pharmaceutical composition comprising the nucleic acid of claim 71, and a pharmaceutically acceptable excipient.

137. A method of editing a cell, comprising inserting the nucleic acid of claim 71 into a genome of the cell.

138.-139. (canceled)

140. A method of killing or inhibiting a target cell in a subject comprising administering the cells of claim 127 to the subject, wherein the cell kills the target cell and/or triggers cytolysis of the target cell.

141.-143. (canceled)

144. A method of treating a disease in a human subject comprising administering the cells of claim 127 to the subject.

145. The method of claim 144, wherein the disease is cancer.

146.-147.

148. A method of treating a disease in a subject comprising:
a. determining or having determined the presence of human SLC34A2-positive (SLC34A2+) cells in a cancer sample obtained from the subject; and/or
b. determining or having determined the presence of human TMPRSS4-positive (TMPRSS4+) cells in a cancer sample obtained from the subject; and
c. administering the cell or immune cell of claim 127 to the subject.

149-151. (canceled)

152. A method of modulating the activity of a cell or immune cell comprising:
a. obtaining a cell or immune cell comprising
the nucleic acid of claim 71;
and
b. contacting the cell or immune cell with a target cell expressing SLC34A2 and TMPRSS4, wherein binding of the priming receptor to SLC34A2 on the target cell induces activation of the priming receptor and expression of the chimeric antigen receptor and wherein binding of the chimeric antigen receptor to TMPRSS4 on the target cell modulates the activity of the immune cell.

153.-159. (canceled)

160. A method of inducing expression of a chimeric antigen receptor with a priming receptor in a cell comprising:
a. obtaining a cell or immune cell comprising
the nucleic acid of claim 71;
and
b. contacting the cell or immune cell with a cell expressing SLC34A2, wherein binding of the priming receptor to SLC34A2 on the cell induces activation of the priming receptor and expression of the chimeric antigen receptor.

161.-167. (canceled)

168. An isolated human cell expressing a priming receptor comprising an antigen-binding domain that specifically binds to human SLC34A2 and a CAR comprising an antigen-binding domain that specifically binds to human TMPPRSS4, wherein binding of the priming receptor to SLC34A2 on the surface of a target cell and binding of the CAR to TMPRSS4 on the surface of a target cell induces lysis of the cell expressing TMPRSS4.

169. (canceled)

170. One or more nucleic acids comprising a nucleic acid sequence encoding a first cell surface receptor that specifically binds to human SLC34A2 and a nucleic acid sequence encoding a second cell surface receptor that specifically binds to human TMPRSS4, wherein binding of the first and second cell surface receptors to SLC34A2 and TMPRSS4 on the surface of one or more human cells, respectively, induces lysis of a human cell with TMPRSS4 on the surface.

171.-181. (canceled)

182. A cell comprising a nucleotide sequence comprising SEQ ID NO: 1238, 1239, 1240, 1241, or 1242 or a nucleotide sequence that differs therefrom in at most 50 nucleotides, wherein the differences are silent substitutions, additions or deletions.

183. A cell comprising a nucleotide sequence comprising SEQ ID NO: 1120, 1121, 1122, 1123, or 1124 or a nucleotide sequence that differs therefrom in at most 50 nucleotides, wherein the differences are silent substitutions, additions or deletions.

184.-188. (canceled)

The application's sequence listing, which the Patent Office published only in electronic form, follows.

SEQUENCE LISTING (1252 sequences)

SEQ ID NO: 1 - protein, 115 aa, synthetic construct
QVQLVQSGAEVKKPGSSVKVSCKASGYTFTDYYMHWVRQAPGQGLEWMGGIIPIFGTANYAQKFQGRVTITADESTSTAYMELSSLRSEDTAVYYCAKEGANGYWGQGTLVTVSS

SEQ ID NO: 2 - protein, 107 aa, synthetic construct
DIQMTQSPSSLSASVGDRVTITCQASQDISNYLNWYQQKPGKAPKLLIYKASSLESGVPSRFSGSGSGTDFTLTISSLQPEDFATYYCQQSSRIPPTFGQGTKVEIK

SEQ ID NO: 3 - protein, 5 aa, synthetic construct
DYYMH

SEQ ID NO: 4 - protein, 17 aa, synthetic construct
GIIPIFGTANYAQKFQG

SEQ ID NO: 5 - protein, 6 aa, synthetic construct
EGANGY

SEQ ID NO: 6 - protein, 11 aa, synthetic construct
QASQDISNYLN

SEQ ID NO: 7 - protein, 7 aa, synthetic construct
KASSLES

SEQ ID NO: 8 - protein, 9 aa, synthetic construct
QQSSRIPPT

SEQ ID NO: 9 - protein, 127 aa, synthetic construct
EVQLLESGGGLVQPGGSLRLSCAASGFTFSDYYMSWVRQAPGKGLEWVSYISGSGDAIYYADSVKGRFTISRDNSKNTLYLQMNSLRAEDTAVYYCARDRSDCGGDDRFLCDGYFDLWGRGTLVSLS

SEQ ID NO: 10 - protein, 107 aa, synthetic construct
DIQMTQSPSSLSASVGDRVTITCRASQSTNNYVNWYQQKPGKAPKLLIYAASSLQSGVPSRFSGSGSGTDFTLTISSLQPEDFATYYCQQSYSIPLTFGPGTKVDIK

SEQ ID NO: 11 - protein, 5 aa, synthetic construct
DYYMS

SEQ ID NO: 12 - protein, 17 aa, synthetic construct
YISGSGDAIYYADSVKG

SEQ ID NO: 13 - protein, 19 aa, synthetic construct
DRSDCGGDDRFLCDGYFDL

SEQ ID NO: 14 - protein, 11 aa, synthetic construct
RASQSTNNYVN

SEQ ID NO: 15 - protein, 7 aa, synthetic construct
AASSLQS

SEQ ID NO: 16 - protein, 9 aa, synthetic construct
QQSYSIPLT

SEQ ID NO: 17 - protein, 127 aa, synthetic construct
QVQLVQSGAEVKKPGSSVKVSCKASGYTFTSYDINWVRQAPGQGLEWMGGIIPIFGTTKFAQKFQGRVTITADESTSTAYMELSSLRSEDTAVYYCARDWYSSSWYNGDRGDWFDPWGQGTLVTVSS

SEQ ID NO: 18 - protein, 112 aa, synthetic construct
DIVMTQSPLSLPVTPGEPASISCRSSGSLLHSNGYNYLDWYLQKPGQSPQLLIYAASSLQSGVPDRFSGSGSGTDFTLKISRVEAEDVGVYYCMQGTHWPGTFGQGTKVEIK

SEQ ID NO: 19 - protein, 5 aa, synthetic construct
SYDIN

SEQ ID NO: 20 - protein, 17 aa, synthetic construct
GIIPIFGTTKFAQKFQG

SEQ ID NO: 21 - protein, 18 aa, synthetic construct
DWYSSSWYNGDRGDWFDP

SEQ ID NO: 22 - protein, 16 aa, synthetic construct
RSSGSLLHSNGYNYLD

SEQ ID NO: 23 - protein, 9 aa, synthetic construct
MQGTHWPGT

SEQ ID NO: 24 - protein, 120 aa, synthetic construct
QVQLVQSGAEVKKPGASVKVSCKASGYFFTTYYLHWVRQAPGQGLEWMGVINPNSRLTSYAESFQGRVTMTRDTSTSTVYMELSSLRSEDTAVYYCEREMFPSSYGIDVWGQGTTVTVSS

SEQ ID NO: 25 - protein, 112 aa, synthetic construct
DIVMTQSPLSLPVTPGEPASISCRSSQSLLHSNGYNYLDWYLQKPGQSPQLLIYAASTLQSGVPDRFSGSGSGTDFTLKISRVEAEDVGVYYCMQGTHWPPTFGQGTKLEIK

SEQ ID NO: 26 - protein, 5 aa, synthetic construct
TYYLH

SEQ ID NO: 27 - protein, 17 aa, synthetic construct
VINPNSRLTSYAESFQG

SEQ ID NO: 28 - protein, 11 aa, synthetic construct
EMFPSSYGIDV

SEQ ID NO: 29 - protein, 16 aa, synthetic construct
RSSQSLLHSNGYNYLD

SEQ ID NO: 30 - protein, 7 aa, synthetic construct
AASTLQS

SEQ ID NO: 31 - protein, 9 aa, synthetic construct
MQGTHWPPT

SEQ ID NO: 32 - protein, 121 aa, synthetic construct
QVQLVQSGAEVKKPGSSVKVSCKASGYTFTSYYMHWVRQAPGQGLEWMGRIIPILGATDYAQKFQGRVTITADESTSTAYMELSSLRSEDTAVYYCARAGYSSIAARPAFWGQGTLVTVSS

SEQ ID NO: 33 - protein, 108 aa, synthetic construct
EIVMTQSPATLSVSPGERATLSCRASQSVSSNLAWYQQKPGQAPRLLIYGASTRATGIPARFSGSGSGTEFTLTISSLQSEDFAVYYCQQYYSPFPLTFGGGTKVEIK

SEQ ID NO: 34 - protein, 5 aa, synthetic construct
SYYMH

SEQ ID NO: 35 - protein, 17 aa, synthetic construct
RIIPILGATDYAQKFQG

SEQ ID NO: 36 - protein, 12 aa, synthetic construct
AGYSSIAARPAF

SEQ ID NO: 37 - protein, 11 aa, synthetic construct
RASQSVSSNLA

SEQ ID NO: 38 - protein, 7 aa, synthetic construct
GASTRAT

SEQ ID NO: 39 - protein, 10 aa, synthetic construct
QQYYSPFPLT

SEQ ID NO: 40 - protein, 126 aa, synthetic construct
QVQLVQSGAEVKKPGASVKVSCKASGYTFTSYYMHWVRQAPGQGLEWLGIINPSDYTTSYAQKFQGRVTMTRDTSTSTVYMELSSLRSEDTAVYYCARVASSSWYPGDENWYFDLWGRGTLVTVSS

SEQ ID NO: 41 - protein, 113 aa, synthetic construct
DIVMTQSPDSLAVSLGERATINCKSSQSVLYSSNNKNYLAWYQQKPGQPPKLLIYWASTRESGVPDRFSGSGSGTDFTLTISSLQAEDVAIYYCQQYYAIPWTFGQGTKVEIK

SEQ ID NO: 42 - protein, 17 aa, synthetic construct
IINPSDYTTSYAQKFQG

SEQ ID NO: 43 - protein, 17 aa, synthetic construct
VASSSWYPGDENWYFDL

SEQ ID NO: 44 - protein, 17 aa, synthetic construct
KSSQSVLYSSNNKNYLA

SEQ ID NO: 45 - protein, 7 aa, synthetic construct
WASTRES

SEQ ID NO: 46 - protein, 9 aa, synthetic construct
QQYYAIPWT

SEQ ID NO: 47 - protein, 118 aa, synthetic construct
QVQLVQSGAEVKKPGASVKVSCKASGYTFSRYFMHWVRQAPGQGLEWVGWINPNSGNTGYAQKFQGRVTMTRDTSTSTVYMELSSLRSEDTAVYYCARVVTGGRLDVWGQGTTVTVSS

SEQ ID NO: 48 - protein, 108 aa, synthetic construct
EIVMTQSPATLSVSPGERATLSCRASQRVSNNYLAWYQQKPGQAPRLLIYGASTRASGIPARFSGSGSGTEFTLTISSLQSEDFAVYYCQQYGSTPYTFGQGTKVEIK

SEQ ID NO: 49 - protein, 5 aa, synthetic construct
RYFMH

SEQ ID NO: 50 - protein, 17 aa, synthetic construct
WINPNSGNTGYAQKFQG

SEQ ID NO: 51 - protein, 9 aa, synthetic construct
VVTGGRLDV

SEQ ID NO: 52 - protein, 12 aa, synthetic construct
RASQRVSNNYLA

SEQ ID NO: 53 - protein, 7 aa, synthetic construct
GASTRAS

SEQ ID NO: 54 - protein, 9 aa, synthetic construct
QQYGSTPYT

SEQ ID NO: 55 - protein, 121 aa, synthetic construct
QVQLVQSGAEVKKPGASVKVSCKASGYRFTSQYMHWVRQAPGQGLEWMGIINPSGGSTSYAQKFQGRVTMTRDTSTSTVYMELSSLRSEDTAVYYCARGRIAVAGHPLGYWGQGTLVTVSS

SEQ ID NO: 56 - protein, 107 aa, synthetic construct
DIQMTQSPSSLSASVGDRVTITCRASQSISSWLAWYQQKPGKAPKLLIYGASSLQSGVPSRFSGSGSGTDFTLTISSLQPEDFATYYCQQANSFPPTFGGGTKVEIK

SEQ ID NO: 57 - protein, 5 aa, synthetic construct
SQYMH

SEQ ID NO: 58 - protein, 17 aa, synthetic construct
IINPSGGSTSYAQKFQG

SEQ ID NO: 59 - protein, 12 aa, synthetic construct
GRIAVAGHPLGY

SEQ ID NO: 60 - protein, 11 aa, synthetic construct
RASQSISSWLA

SEQ ID NO: 61 - protein, 7 aa, synthetic construct
GASSLQS

SEQ ID NO: 62 - protein, 9 aa, synthetic construct
QQANSFPPT

SEQ ID NO: 63 - protein, 120 aa, synthetic construct
QVQLVQSGAEVKKPGASVKVSCKASGYTFTRYYMHWVRQAPGQGLEWMGWINPNSGGTNYAQKFQGRVTMTRDTSTSTVYMELSSLRSEDTAVYYCARGGSWGSGPLGYWGQGTLVTVSS

SEQ ID NO: 64 - protein, 107 aa, synthetic construct
DIQMTQSPSSLSASVGDRVTITCQASQDISRFLHWYQQKPGKAPKLLIYGASNLKSGVPSRFSGSGSGTDFTLTISSLQPEDFATYYCQQSYSTPPTFGGGTKVEIK

SEQ ID NO: 65 - protein, 5 aa, synthetic construct
RYYMH

SEQ ID NO: 66 - protein, 17 aa, synthetic construct
WINPNSGGTNYAQKFQG

SEQ ID NO: 67 - protein, 11 aa, synthetic construct
GGSWGSGPLGY

SEQ ID NO: 68 - protein, 11 aa, synthetic construct
QASQDISRFLH

SEQ ID NO: 69 - protein, 7 aa, synthetic construct
GASNLKS

SEQ ID NO: 70 - protein, 9 aa, synthetic construct
QQSYSTPPT

SEQ ID NO: 71 - protein, 121 aa, synthetic construct
QVQLVQSGAEVKKPGASVKVSCKASGYTFTSYYMHWVRQAPGQGLEWMGIINPSGAGTTYGHNFQGRVTMTRDTSTSTVYMELSSLRSEDTAVYYCARGPRDTAMVRFDYWGQGTLVTVSS

SEQ ID NO: 72 - protein, 107 aa, synthetic construct
EIVMTQSPATLSVSPGERATLSCRASQSVSSYLAWYQQKPGQAPRLLIYGASTRATGIPARFSGSGSGTEFTLTISSLQSEDFAVYYCQQYGSSPGTFGQGTKLEIK

SEQ ID NO: 73 - protein, 17 aa, synthetic construct
IINPSGAGTTYGHNFQG

SEQ ID NO: 74 - protein, 12 aa, synthetic construct
GPRDTAMVRFDY

SEQ ID NO: 75 - protein, 11 aa, synthetic construct
RASQSVSSYLA

SEQ ID NO: 76 - protein, 9 aa, synthetic construct
QQYGSSPGT

SEQ ID NO: 77 - protein, 116 aa, synthetic construct
QVQLVQSGAEVKKPGASVKVSCKASGGTFSNYAISWVRQAPGQGLEWVGRINPNSGGTNYAQKFQGRVTMTRDTSTSTVYMELSSLRSEDTAVYYCARGRYSSSSWGQGTLVTVSS

SEQ ID NO: 78 - protein, 107 aa, synthetic construct
DIQMTQSPSSLSASVGDRVTITCRASQSINNYLNWYQQKPGKAPKLLIYAASSLQSGVPSRFSGSGSGTDFTLTISSLQPEDFATYYCQQSYSTKWTFGQGTKVEIK

SEQ ID NO: 79 - protein, 5 aa, synthetic construct
NYAIS

SEQ ID NO: 80 - protein, 17 aa, synthetic construct
RINPNSGGTNYAQKFQG

SEQ ID NO: 81 - protein, 7 aa, synthetic construct
GRYSSSS

SEQ ID NO: 82 - protein, 11 aa, synthetic construct
RASQSINNYLN

SEQ ID NO: 83 - protein, 9 aa, synthetic construct
QQSYSTKWT

SEQ ID NO: 84 - protein, 120 aa, synthetic construct
QVQLVQSGAEVKKPGASVKVSCKASGYTFSNYYIHWVRQAPGQGLEWMGWINPNSGDTNYAQKFQGRVTMTRDTSTSTVYMELSSLRSEDTAVYYCARGMTWRTSAATYWGQGTLVTVSS

SEQ ID NO: 85 - protein, 107 aa, synthetic construct
DIQMTQSPSSLSASVGDRVTITCRASQGISRWLAWYQQKPGKAPKLLIYGASNLQTGVPSRFSGSGSGTDFTLTISSLQPEDFATYYCQQSYSTPPTFGPGTKVDIK

SEQ ID NO: 86 - protein, 5 aa, synthetic construct
NYYIH

SEQ ID NO: 87 - protein, 17 aa, synthetic construct
WINPNSGDTNYAQKFQG

SEQ ID NO: 88 - protein, 11 aa, synthetic construct
GMTWRTSAATY

SEQ ID NO: 89 - protein, 11 aa, synthetic construct
RASQGISRWLA

SEQ ID NO: 90 - protein, 7 aa, synthetic construct
GASNLQT

SEQ ID NO: 91 - protein, 121 aa, synthetic construct
QVQLVQSGAEVKKPGASVKVSCKASGYTFTNYYMHWVRQAPGQGLEWMGWISAYNGNTNYAQKLQGRVTMTRDTSTSTVYMELSSLRSEDTAVYYCATASGWGHSNSAGYWGQGTLVTVSS

SEQ ID NO: 92 - protein, 108 aa, synthetic construct
EIVMTQSPATLSVSPGERATLSCRASQSVNGNYLAWYQQKPGQAPRLLIYGVSSRASGIPARFSGSGSGTEFTLTISSLQSEDFAVYYCQQYGSSPYTFGQGTKVEIK

SEQ ID NO: 93 - protein, 5 aa, synthetic construct
NYYMH

SEQ ID NO: 94 - protein, 17 aa, synthetic construct
WISAYNGNTNYAQKLQG

SEQ ID NO: 95 - protein, 12 aa, synthetic construct
ASGWGHSNSAGY

SEQ ID NO: 96 - protein, 12 aa, synthetic construct
RASQSVNGNYLA

SEQ ID NO: 97 - protein, 7 aa, synthetic construct
GVSSRAS

SEQ ID NO: 98 - protein, 9 aa, synthetic construct
QQYGSSPYT

SEQ ID NO: 99 - protein, 121 aa, synthetic construct
EVQLLESGGGLVQPGGSLRLSCAASGFTFSNHYMSWVRQAPGKGLEWVSAISGSGGSTYYADSVKGRFTISRDNSKNTLYLQMNSLRAGDTAVYYCARDRYRWGRGYFQHWGQGTLVTVSS

SEQ ID NO: 100 - protein, 107 aa, synthetic construct
DIQMTQSPSSLSASVGDRVTITCRASQRISTYLNWYQQKPGKAPKLLIYSASTLQAGVPSRFSGSGSGTDFTLTISSLQPEDFATYYCQQAYSLPWTFGQGTKLEIK

SEQ ID NO: 101 - protein, 5 aa, synthetic construct
NHYMS

SEQ ID NO: 102 - protein, 17 aa, synthetic construct
AISGSGGSTYYADSVKG

SEQ ID NO: 103 - protein, 12 aa, synthetic construct
DRYRWGRGYFQH

SEQ ID NO: 104 - protein, 11 aa, synthetic construct
RASQRISTYLN

SEQ ID NO: 105 - protein, 7 aa, synthetic construct
SASTLQA

SEQ ID NO: 106 - protein, 9 aa, synthetic construct
QQAYSLPWT

SEQ ID NO: 107 - protein, 121 aa, synthetic construct
QVQLVQSGAEVKKPGASVKVSCKASGYTFTRYYMHWVRQAPGQGLEWMGWINPNSGVTNFAQKFQGRVTMTRDTSTSTVYMELSSLRSEDTAVYYCARVRIGWLQSPPLYWGQGTLVTVSS

SEQ ID NO: 108 - protein, 107 aa, synthetic construct
DIQMTQSPSSLSASVGDRVTITCRASQSINTWLAWYQQKPGKAPKLLIYAASSLQSGVPSRFSGSGSGTDFTLTISSLQPEDFATYYCQQAISFPLTFGGGTKVEIK

SEQ ID NO: 109 - protein, 17 aa, synthetic construct
WINPNSGVTNFAQKFQG

SEQ ID NO: 110 - protein, 12 aa, synthetic construct
VRIGWLQSPPLY

SEQ ID NO: 111 - protein, 11 aa, synthetic construct
RASQSINTWLA

SEQ ID NO: 112 - protein, 9 aa, synthetic construct
QQAISFPLT

SEQ ID NO: 113 - protein, 119 aa, synthetic construct
QVQLVQSGAEVKKPGASVKVSCKASGYTFSRHYMHWVRQAPGQGLEWMGRINPNSGGTNYAQKFQGRVTMTRDTSTSTVYMELSSLRSEDTAVYYCARSIYGDYWFDPWGQGTLVTVSS

SEQ ID NO: 114 - protein, 107 aa, synthetic construct
DIQMTQSPSSLSASVGDRVTITCRASQSINRWLAWYQQKPGKAPKLLIYGASNLQSGVPSRFSGSGSGTDFTLTISSLQPEDFATYYCQQANSFPYTFGQGTKLEIK

SEQ ID NO: 115 - protein, 5 aa, synthetic construct
RHYMH

SEQ ID NO: 116 - protein, 10 aa, synthetic construct
SIYGDYWFDP

SEQ ID NO: 117 - protein, 11 aa, synthetic construct
RASQSINRWLA

SEQ ID NO: 118 - protein, 7 aa, synthetic construct
GASNLQS

SEQ ID NO: 119 - protein, 9 aa, synthetic construct
QQANSFPYT

SEQ ID NO: 120 - protein, 117 aa, synthetic construct
QVQLVQSGAEVKKPGASVKVSCKASGYTFTSYYIHWVRQAPGQGLEWMGWMSPNSGDTGYAQKFQGRVTMTRDTSTSTVYMELSSLRSEDTAVYYCARLVRGGFDYWGQGTLVTVSS

SEQ ID NO: 121 - protein, 107 aa, synthetic construct
DIQMTQSPSSLSASVGDRVTITCRASQGISSYLNWYQQKPGKAPKLLIYAASRLQSGVPSRFSGSGSGTDFTLTISSLQPEDFATYYCQQSYRSPPTFGQGTKLEIK

SEQ ID NO: 122 - protein, 5 aa, synthetic construct
SYYIH

SEQ ID NO: 123 - protein, 17 aa, synthetic construct
WMSPNSGDTGYAQKFQG

SEQ ID NO: 124 - protein, 8 aa, synthetic construct
LVRGGFDY

SEQ ID NO: 125 - protein, 11 aa, synthetic construct
RASQGISSYLN

SEQ ID NO: 126 - protein, 7 aa, synthetic construct
AASRLQS

SEQ ID NO: 127 - protein, 9 aa, synthetic construct
QQSYRSPPT

SEQ ID NO: 128 - protein, 122 aa, synthetic construct
QVQLVQSGAEVKKPGASVKVSCKASGYTFTSSGINWVRQAPGQGLEWMGWINPNSGGAKYAQRFQGRVTMTRDTSTSTVYMELSSLRSEDTAVYYCARARGYSGSKRDFQHWGQGTLVTVSS

SEQ ID NO: 129 - protein, 113 aa, synthetic construct
DIVMTQSPDSLAVSLGERATINCKSSQSVLYSSNNKNYLAWYQQKPGQPPKLLIYWASTRESGVPDRFSGSGSGTDFTLTISSLQAEDVAVYHCQQYYNTPFTFGPGTKVDIK

SEQ ID NO: 130 - protein, 5 aa, synthetic construct
SSGIN

SEQ ID NO: 131 - protein, 17 aa, synthetic construct
WINPNSGGAKYAQRFQG

SEQ ID NO: 132 - protein, 13 aa, synthetic construct
ARGYSGSKRDFQH

SEQ ID NO: 133 - protein, 9 aa, synthetic construct
QQYYNTPFT

SEQ ID NO: 134 - protein, 123 aa, synthetic construct
QVQLVQSGAEVKKPGASVKVSCKASGYTFNRKFMHWVRQAPGQGLEWMGWMNPNNGATNYAQKFQGRVTMTRDTSTSTVYMELSSLRSEDTAVYYCARGRGYYGSGSYYGDYWGQGTLVTVSS

SEQ ID NO: 135 - protein, 107 aa, synthetic construct
DIQMTQSPSSLSASVGDRVTITCRASQSISRYLNWYQQKPGKAPKLLIYGASNLQSGVPSRFSGSGSGTDFTLTISSLQPEDFATYYCQQSYSTPPTFGPGTKVDIK

SEQ ID NO: 136 - protein, 5 aa, synthetic construct
RKFMH

SEQ ID NO: 137 - protein, 17 aa, synthetic construct
WMNPNNGATNYAQKFQG

SEQ ID NO: 138 - protein, 14 aa, synthetic construct
GRGYYGSGSYYGDY

SEQ ID NO: 139 - protein, 11 aa, synthetic construct
RASQSISRYLN

SEQ ID NO: 140 - protein, 116 aa, synthetic construct
QVQLVQSGAEVKKPGASVKVSCKASGYTFTRYYMHWVRQAPGQGLEWMGWMNPNSGNAGYAQKLQGRVTMTRDTSTSTVYMELSSLRSEDTAVYYCARGYNWFDPWGQGTLVTVSS

SEQ ID NO: 141 - protein, 107 aa, synthetic construct
DIQMTQSPSSLSASVGDRVTITCRASQNIATYLSWYQQKPGKAPKLLIYGASALRSGVPSRFSGSGSGTDFTLTISSLQPEDFATYYCLQHNTYPLTFGGGTKVEIK

SEQ ID NO: 142 - protein, 17 aa, synthetic construct
WMNPNSGNAGYAQKLQG

SEQ ID NO: 143 - protein, 7 aa, synthetic construct
GYNWFDP

SEQ ID NO: 144 - protein, 11 aa, synthetic construct
RASQNIATYLS

SEQ ID NO: 145 - protein, 7 aa, synthetic construct
GASALRS

SEQ ID NO: 146 - protein, 9 aa, synthetic construct
LQHNTYPLT

SEQ ID NO: 147 - protein, 117 aa, synthetic construct
QVQLVQSGAEVKKPGASVKVSCKASGYSFSGYYLHWVRQAPGQGLEWMGWMNPDSGNTGYAQNFQGRVTMTRDTSTSTVYMELSSLRSEDTAVYYCARLHRGGHDYWGQGTLVTVSS

SEQ ID NO: 148 - protein, 107 aa, synthetic construct
DIQMTQSPSSLSASVGDRVTITCRASQSISRYLNWYQQKPGKAPKLLIYAASTLQSGVPSRFSGSGSGTDFTLTISSLQPEDFATYYCQQSYSTPVTFGQGTRLEIK

SEQ ID NO: 149 - protein, 5 aa, synthetic construct
GYYLH

SEQ ID NO: 150 - protein, 17 aa, synthetic construct
WMNPDSGNTGYAQNFQG

SEQ ID NO: 151 - protein, 8 aa, synthetic construct
LHRGGHDY

SEQ ID NO: 152 - protein, 9 aa, synthetic construct
QQSYSTPVT

SEQ ID NO: 153 - protein, 121 aa, synthetic construct
QVQLVQSGAEVKKPGASVKVSCKASGYTFTSYYMHWVRQAPGQGLEWMGRINPHSGDADFVDKFQGRVTMTRDTSTSTVYMELSSLRSEDTAVYYCARDRRGYGGNSLDYWGQGTLVTVSS

SEQ ID NO: 154 - protein, 107 aa, synthetic construct
DIQMTQSPSSLSASVGDRVTITCRAGQNIKRYLNWYQQKPGKAPKLLIYAASSLQSGVPSRFSGSGSGTDFTLTISSLQPEDFATYYCQQSYSSPLTFGGGTKVEIK

SEQ ID NO: 155 - protein, 17 aa, synthetic construct
RINPHSGDADFVDKFQG

SEQ ID NO: 156 - protein, 12 aa, synthetic construct
DRRGYGGNSLDY

SEQ ID NO: 157 - protein, 11 aa, synthetic construct
RAGQNIKRYLN

SEQ ID NO: 158 - protein, 9 aa, synthetic construct
QQSYSSPLT

SEQ ID NO: 159 - protein, 120 aa, synthetic construct
QVQLVQSGAEVKKPGASVKVSCKASGYTFTRNYLHWVRQAPGQGLEWMGIINPSGGSTTYAQKFQGRVTMTRDTSTSTVYMELSSLRSEDTAVYYCARGRTWFRSGMDVWGQGTTVTVSS

SEQ ID NO: 160 - protein, 108 aa, synthetic construct
EIVMTQSPATLSVSPGERATLSCRASQSVGNYLAWYQQKPGQAPRLLIYGASTRATGIPARFSGSGSGTEFTLTISSLQSEDFAVYYCQQYHSSPPYTFGQGTKVEIK

SEQ ID NO: 161 - protein, 5 aa, synthetic construct
RNYLH

SEQ ID NO: 162 - protein, 17 aa, synthetic construct
IINPSGGSTTYAQKFQG

SEQ ID NO: 163 - protein, 11 aa, synthetic construct
GRTWFRSGMDV

SEQ ID NO: 164 - protein, 11 aa, synthetic construct
RASQSVGNYLA

SEQ ID NO: 165 - protein, 10 aa, synthetic construct
QQYHSSPPYT

SEQ ID NO: 166 - protein, 120 aa, synthetic construct
QVQLVQSGAEVKKSGASVKVSCKASGYTFTSYYMHWVRQAPGQGLEWMGVINPSGGTTSYAQKFQGRVTMTRETSTSTVYMELSSLRSEDTAVYYCARGRGWLRSALGYWGQGTLVTVSS

SEQ ID NO: 167 - protein, 107 aa, synthetic construct
DIQMTQSPSSLSASVGDRVTITCRASQSISSWLAWYQQKPGKAPKLLIYAASTLQSGVPSRFSGSGSGTDFTLTISSLQPEDFATYYCQQSYNTPYTFGQGTKLEIK

SEQ ID NO: 168 - protein, 17 aa, synthetic construct
VINPSGGTTSYAQKFQG

SEQ ID NO: 169 - protein, 11 aa, synthetic construct
GRGWLRSALGY

SEQ ID NO: 170 - protein, 9 aa, synthetic construct
QQSYNTPYT

SEQ ID NO: 171 - protein, 125 aa, synthetic construct
QVQLVQSGAEVKKPGASVKVSCKASGGRFSTYALSWVRQAPGQGLEWMGWINPNSGGTNYAQKFQGRVTMTRDTSTSTVYMELSSLRSEDTAVYYCAKSLWWSPSHYYYYGMDVWGQGTTVTVSS

SEQ ID NO: 172 - protein, 110 aa, synthetic construct
EIVMTQSPATLSVSPGERATLSCRASQSVSSNYLAWYQQKPGQAPRLLIYGISTRASGIPARFSGSGSGTEFTLTISSLQSEDFAVYYCQQRSNWPPSITFGQGTRLEIK

SEQ ID NO: 173 - protein, 5 aa, synthetic construct
TYALS

SEQ ID NO: 174 - protein, 16 aa, synthetic construct
SLWWSPSHYYYYGMDV

SEQ ID NO: 175 - protein, 12 aa, synthetic construct
RASQSVSSNYLA

SEQ ID NO: 176 - protein, 7 aa, synthetic construct
GISTRAS

SEQ ID NO: 177 - protein, 11 aa, synthetic construct
QQRSNWPPSIT

SEQ ID NO: 178 - protein, 118 aa, synthetic construct
EVQLLESGGGLVQPGGSLRLSCAASGFTFSSYAMHWVRQAPGKGLEWVAVIWYDGSSKYYADSVKGRFTISRDNSKNTLYLQMNSLRAEDTAVYYCARGEVRRGFQHWGQGTLVTVSS

SEQ ID NO: 179 - protein, 107 aa, synthetic construct
DIQMTQSPSSLSASVGDRVTITCRASQNVGSWLAWYQQKPGKAPKLLIYAASSLQSGVPSRFSGSGSGTDFTLTIRSLQPEDFATYYCQQSYSTPITFGQGTRLEIK

SEQ ID NO: 180 - protein, 5 aa, synthetic construct
SYAMH

SEQ ID NO: 181 - protein, 17 aa, synthetic construct
VIWYDGSSKYYADSVKG

SEQ ID NO: 182 - protein, 9 aa, synthetic construct
GEVRRGFQH

SEQ ID NO: 183 - protein, 11 aa, synthetic construct
RASQNVGSWLA

SEQ ID NO: 184 - protein, 9 aa, synthetic construct
QQSYSTPIT

SEQ ID NO: 185 - protein, 120 aa, synthetic construct
QVQLVQSGAEVKKPGASVKVSCKASGYTFSRYYMHWVRQAPGQGLEWMGWMNPNSGDTGYAQKFQGRVTMTRDTSTSTVYMELSSLRSEDTAVYYCAKGREWLRSPFDYWGQGTLVTVSS

SEQ ID NO: 186 - protein, 107 aa, synthetic construct
DIQMTQSPSSLSASVGDRVTITCRASQSISTWLAWYQQKPGKAPKLLIYAASSLQSGVPSRFSGSGSGTDFTLTISSLQPEDFATYYCQQLSSYPLTFGQGTKVEIK

SEQ ID NO: 187 - protein, 5 aa, synthetic construct
RYYMH

SEQ ID NO: 188 - protein, 17 aa, synthetic construct
WMNPNSGDTGYAQKFQG

SEQ ID NO: 189 - protein, 11 aa, synthetic construct
GREWLRSPFDY

SEQ ID NO: 190 - protein, 9 aa, synthetic construct
QQLSSYPLT

SEQ ID NO: 191 - protein, 119 aa, synthetic construct
QVQLVQSGAEVKKPGASVKVSCKASGYTFTGYYMHWVRQAPGQGLEWMGWMNPNSGNTGYAQKFQGRVTMTRDTSTSTVYMELSSLRSEDTAVYYCARLRAKGGGFDYWGQGTLVTVSS

SEQ ID NO: 192 - protein, 107 aa, synthetic construct
DIQMTQSPSSLSASVGDRVTITCRASQGIGNYLAWYQQKPGKAPKLLIYAASSLESGVPSRFSGSGSGTDFTLTISSLQPEDFATYYCQQGYRFPPTFGPGTKVDIK

SEQ ID NO: 193 - protein, 5 aa, synthetic construct
GYYMH

SEQ ID NO: 194 - protein, 17 aa, synthetic construct
WMNPNSGNTGYAQKFQG

SEQ ID NO: 195 - protein, 10 aa, synthetic construct
LRAKGGGFDY

SEQ ID NO: 196 - protein, 11 aa, synthetic construct
RASQGIGNYLA

SEQ ID NO: 197 - protein, 7 aa, synthetic construct
AASSLES

SEQ ID NO: 198 - protein, 9 aa, synthetic construct
QQGYRFPPT

SEQ ID NO: 199 - protein, 123 aa, synthetic construct
QVQLVQSGAEVKKPGASVKVSCKASGYTFANYNIHWVRQAPGQGLEWMGWMNPNSGNTGYAQKFQGRVTMTRDTSTSTVYMELSSLRSEDTAVYYCARPRYSSGWYGWYFDLWGRGTLVTVSS

SEQ ID NO: 200 - protein, 112 aa, synthetic construct
DIVMTQSPLSLPVTPGEPASISCRSSQSLLHSNGYNYLDWYLQKPGQSPQLLIYLGSNRASGVPDRFSGSGSGTDFTLKISRVEAEDVGVYYCMQSTYWPPTFGQGTKLEIK

SEQ ID NO: 201 - protein, 5 aa, synthetic construct
NYNIH

SEQ ID NO: 202 - protein, 14 aa, synthetic construct
PRYSSGWYGWYFDL

SEQ ID NO: 203 - protein, 7 aa, synthetic construct
LGSNRAS

SEQ ID NO: 204 - protein, 9 aa, synthetic construct
MQSTYWPPT

SEQ ID NO: 205 - protein, 120 aa, synthetic construct
QVQLVQSGAEVKKPGASVKVSCKASGYTFTTYYMHWVRQAPGQGLEWMGWMNPNSGNTGYAQKFQGRVTMTRDTSTSTVYMELSSLRSEDTAVYYCARARTWLLSPFDYWGQGTLVTVSS

SEQ ID NO: 206 - protein, 108 aa, synthetic construct
EIVMTQSPATLSVSPGERATLSCRASQSVGRYLAWYQQKPGQAPRLLIYGASTRATGIPARFSGSGSGTEFTLTISSLQSEDFAVYYCQHYDSSPMYTFGQGTKLEIK

SEQ ID NO: 207 - protein, 5 aa, synthetic construct
TYYMH

SEQ ID NO: 208 - protein, 11 aa, synthetic construct
ARTWLLSPFDY

SEQ ID NO: 209 - protein, 11 aa, synthetic construct
RASQSVGRYLA

SEQ ID NO: 210 - protein, 10 aa, synthetic construct
QHYDSSPMYT

SEQ ID NO: 211 - protein, 119 aa, synthetic construct
QVQLVQSGAEVKKPGSSVKVSCKASGYTFRGSGISWVRQAPGQGLEWMGIIYPADSETRYSPSFQGRVTITADESTSTAYMELSSLRSEDTAVYYCARESSSWDYFDYWGQGTLVTVSS

SEQ ID NO: 212 - protein, 107 aa, synthetic construct
EIVMTQSPATLSVSPGERATLSCRASQSVRSYLAWYQQKPGQAPRLLIYGASTRATGIPARFSGSGSGTEFTLTISSLQSEDFAVYYCQQHGSLPLTFGQGTKVEIK

SEQ ID NO: 213 - protein, 5 aa, synthetic construct
GSGIS

SEQ ID NO: 214 - protein, 17 aa, synthetic construct
IIYPADSETRYSPSFQG

SEQ ID NO: 215 - protein, 10 aa, synthetic construct
ESSSWDYFDY

SEQ ID NO: 216 - protein, 11 aa, synthetic construct
RASQSVRSYLA

SEQ ID NO: 217 - protein, 9 aa, synthetic construct
QQHGSLPLT

SEQ ID NO: 218 - protein, 116 aa, synthetic construct
QVQLVQSGAEVKKPGSSVKVSCKASGGTFSSYAISWVRQAPGQGLEWMGRINPSGGSTSYAQKFQGRVTMTRDTSTSTVYMELSSLRSEDTAVYYCARGRYSSSSWGQGTLVTVSS

SEQ ID NO: 219 - protein, 107 aa, synthetic construct
DIQMTQSPSSLSASVGDRVTITCRASQSISTYLNWYQQKPGKAPKLLIYAASSLQRGVPSRFSGSGSGTDFTLTISSLQPEDFATYYCQQSYTTPLTFGGGTKVEIK

SEQ ID NO: 220 - protein, 5 aa, synthetic construct
SYAIS

SEQ ID NO: 221 - protein, 17 aa, synthetic construct
RINPSGGSTSYAQKFQG

SEQ ID NO: 222 - protein, 11 aa, synthetic construct
RASQSISTYLN

SEQ ID NO: 223 - protein, 7 aa, synthetic construct
AASSLQR

SEQ ID NO: 224 - protein, 9 aa, synthetic construct
QQSYTTPLT

SEQ ID NO: 225 - protein, 120 aa, synthetic construct
QVQLVQSGAEVKKPGASVKVSCKASGYTFSNYYMHWVRQAPGQGLEWVGWMNPKSGNTGYAQKFQGRVTMTRDTSTSTVYMELSSLRSEDTAVYYCARGRTWIQSSLGYWGQGTLVTVSS

SEQ ID NO: 226 - protein, 107 aa, synthetic construct
DIQMTQSPSSLSASVGDRVTITCRASQYISRWLAWYQQKPGKAPKLLIYGSSTLQSGVPSRFSGSGSGTDFTLTISSLQPEDFATYYCQQYYSTPFTFGPGTKLEIK

SEQ ID NO: 227 - protein, 5 aa, synthetic construct
NYYMH

SEQ ID NO: 228 - protein, 17 aa, synthetic construct
WMNPKSGNTGYAQKFQG

SEQ ID NO: 229 - protein, 11 aa, synthetic construct
GRTWIQSSLGY

SEQ ID NO: 230 - protein, 11 aa, synthetic construct
RASQYISRWLA

SEQ ID NO: 231 - protein, 7 aa, synthetic construct
GSSTLQS

SEQ ID NO: 232 - protein, 9 aa, synthetic construct
QQYYSTPFT

SEQ ID NO: 233 - protein, 121 aa, synthetic construct
QVQLVQSGAEVKKPGASVKVSCKASGYTFTGYYIHWVRQAPGQGLEWMGWMNPHSGNTGYAQKFQGRVTMTRDTSTSTVYMELSSLRSEDTAVYYCAREGGRYSSGRLGYWGQGTLVTVSS

SEQ ID NO: 234 - protein, 107 aa, synthetic construct
DIQMTQSPSSLSASVGDRVTITCRASQGISSWLAWYQQKPGKAPKLLIYAASTLQTGVPSRFSGSGSGTDFTLTISSLQPEDFATYYCQQSKSIPITFGGGTKVEIK

SEQ ID NO: 235 - protein, 5 aa, synthetic construct
GYYIH

SEQ ID NO: 236 - protein, 17 aa, synthetic construct
WMNPHSGNTGYAQKFQG

SEQ ID NO: 237 - protein, 12 aa, synthetic construct
EGGRYSSGRLGY

SEQ ID NO: 238 - protein, 11 aa, synthetic construct
RASQGISSWLA

SEQ ID NO: 239 - protein, 7 aa, synthetic construct
AASTLQT

SEQ ID NO: 240 - protein, 9 aa, synthetic construct
QQSKSIPIT

SEQ ID NO: 241 - protein, 125 aa, synthetic construct
QVQLVQSGAEVKKPGASVKVSCKASGYTFTGYYMHWVRQAPGQGLEWMGKISAHSGETKYAQNVQGRVTMTRDTSTSTVYMELSSLRSEDTAVYYCARANYYGDYVNYYYGMDVWGQGTTVTVSS

SEQ ID NO: 242 - protein, 107 aa, synthetic construct
DIQMTQSPSSLSASVGDRVTITCQASQDISNYLNWYQQKPGKAPKLLIYKASSLESGVPSRFSGSGSGTDFTLTISSLQPEDFATYYCQQTYTIPITFGQGTRLEIK

SEQ ID NO: 243 - protein, 17 aa, synthetic construct
KISAHSGETKYAQNVQG

SEQ ID NO: 244 - protein, 16 aa, synthetic construct
ANYYGDYVNYYYGMDV

SEQ ID NO: 245 - protein, 9 aa, synthetic construct
QQTYTIPIT

SEQ ID NO: 246 - protein, 119 aa, synthetic construct
EVQLLESGGGLVQPGGSLRLSCAASGFTFSSRAMSWVRQAPGKGLEWVSRINYDGSATTYADSVKGRFTISRDNSKNTLYLQMNSLRAEDTAVYYCARGITIFGVFDYWGQGTLVTVSS

SEQ ID NO: 247 - protein, 107 aa, synthetic construct
DIQMTQSPSSLSASVGDRVTITCRASQSISTWLAWYQQKPGKAPKLLIYRASNLQSGVPSRFSGSGSGTDFTLTISSLQPEDFATYYCQQSYSTPLTFGGGTKVEIK

SEQ ID NO: 248 - protein, 5 aa, synthetic construct
SRAMS

SEQ ID NO: 249 - protein, 17 aa, synthetic construct
RINYDGSATTYADSVKG

SEQ ID NO: 250 - protein, 10 aa, synthetic construct
GITIFGVFDY

SEQ ID NO: 251 - protein, 7 aa, synthetic construct
RASNLQS

SEQ ID NO: 252 - protein, 9 aa, synthetic construct
QQSYSTPLT

SEQ ID NO: 253 - protein, 121 aa, synthetic construct
EVQLLESGGGLVQPGGSLRLSCAASGFTFSSYAMHWVRQAPGKGLEWVSYISSSGSTVYYADSVKGRFTISRDNSKNTLYLQMNSLRAEDTAVYYCARVSNVTPRSGFGYWGQGTLVTVSS

SEQ ID NO: 254 - protein, 107 aa, synthetic construct
DIQMTQSPSSLSASVGDRVTITCRASQSISRYLNWYQQKPGKAPKLLIYSASTLQSGVPSRFSGSGSGTDFTLTISSLQPEDFATYYCQQAHSFPPSFGQGTKLEIK

SEQ ID NO: 255 - protein, 17 aa, synthetic construct
YISSSGSTVYYADSVKG

SEQ ID NO: 256 - protein, 12 aa, synthetic construct
VSNVTPRSGFGY

SEQ ID NO: 257 - protein, 7 aa, synthetic construct
SASTLQS

SEQ ID NO: 258 - protein, 9 aa, synthetic construct
QQAHSFPPS

SEQ ID NO: 259 - protein, 121 aa, synthetic construct
QVQLAQSGAEVKKPGASVKVSCKASGYTFTRHYIQWVRQAPGQGLEWMGWINPNSGNTGYAQKFQGRVTMTRDTSTSTVYMELSSLRSEDTAVYYCARGRQWLRGEYFQHWGQGTLVTVSS

SEQ ID NO: 260 - protein, 107 aa, synthetic construct
DIQMTQSPSSLSASVGDRVTITCQASQDISRYLNWYQQKPGKAPKLLIYGASNLLSGVPSRFSGSGSGTDFTLTISSLQPEDFATYYCQQTHTTPYTFGQGTRLEIK

SEQ ID NO: 261 - protein, 5 aa, synthetic construct
RHYIQ

SEQ ID NO: 262 - protein, 12 aa, synthetic construct
GRQWLRGEYFQH

SEQ ID NO: 263 - protein, 11 aa, synthetic construct
QASQDISRYLN

SEQ ID NO: 264 - protein, 7 aa, synthetic construct
GASNLLS

SEQ ID NO: 265 - protein, 9 aa, synthetic construct
QQTHTTPYT

SEQ ID NO: 266 - protein, 118 aa, synthetic construct
QVQLVQSGAEVKKPGASVKVSCKASGGSFSGYAVSWVRQAPGQGLEWLGVINPSDSWTAFAQKFQGRVTMTRDTSTSTVYMELSSLRSEDTAVYYCAREREDDAFDIWGQGTTVTVSS

SEQ ID NO: 267 - protein, 107 aa, synthetic construct
DIQMTQSPSSLSASVGDRVTITCRASQGIRNWLAWYQQKPGKAPKLLIYRASTLQSGVPSRFSGSGSGTDFTLTISSLQPEDFATYYCQQSYTTPFTFGQGTKLEIK

SEQ ID NO: 268 - protein, 5 aa, synthetic construct
GYAVS

SEQ ID NO: 269 - protein, 17 aa, synthetic construct
VINPSDSWTAFAQKFQG

SEQ ID NO: 270 - protein, 9 aa, synthetic construct
EREDDAFDI

SEQ ID NO: 271 - protein, 11 aa, synthetic construct
RASQGIRNWLA

SEQ ID NO: 272 - protein, 7 aa, synthetic construct
RASTLQS

SEQ ID NO: 273 - protein, 9 aa, synthetic construct
QQSYTTPFT

SEQ ID NO: 274 - protein, 121 aa, synthetic construct
QVQLVQSGAEVKKPGASVKVSCKASGGTFSSYAISWVRQAPGQGLEWMGIINPRGGSTNYAQKFQGRVTMTRDTSTSTVYMELSSLRSEDTAVYYCAREGSSWYYDAFDIWGQGTMVTVSS

SEQ ID NO: 275 - protein, 107 aa, synthetic construct
DIQMTQSPSSLSASVGDRVTITCRASQSISSYLNWYQQKPGKAPKLLIYAAYNLQSGVPSRFSGSGSGTDFTLTISSLQPEDFATYYCQQSYSIPFTFGGGTKVEIK

SEQ ID NO: 276 - protein, 17 aa, synthetic construct
IINPRGGSTNYAQKFQG

SEQ ID NO: 277 - protein, 12 aa, synthetic construct
EGSSWYYDAFDI

SEQ ID NO: 278 - protein, 11 aa, synthetic construct
RASQSISSYLN

SEQ ID NO: 279 - protein, 7 aa, synthetic construct
AAYNLQS

SEQ ID NO: 280 - protein, 9 aa, synthetic construct
QQSYSIPFT

SEQ ID NO: 281 - protein, 121 aa, synthetic construct
QVQLVQSGAEVKKPGASVKVSCKASGGTFSSYAISWVRQAPGQGLEWMGWMNPNSGDTHYAQKFQGRVTMTRDTSTSTVYMELSSLRSEDTAVYYCAREGSSWYYDAFDIWGQGTLVTVSS

SEQ ID NO: 282 - protein, 107 aa, synthetic construct
DIQMTQSPSSLSASVGDRVTITCRASQSISRWLAWYQQKPGKAPKLLIYAASTLQTGVPSRFSGSGSGTDFTLTISSLQPEDFATYYCLQHSSYPFTFGQGTKVEIK

SEQ ID NO: 283 - protein, 17 aa, synthetic construct
WMNPNSGDTHYAQKFQG

SEQ ID NO: 284 - protein, 11 aa, synthetic construct
RASQSISRWLA

SEQ ID NO: 285 - protein, 9 aa, synthetic construct
LQHSSYPFT

SEQ ID NO: 286 - protein, 116 aa, synthetic construct
QVQLVQSGAEVKKPGASVKVSCKASGYSFTSHYMHWVRQAPGQGLEWMGWMNPNSGNTGYAQKFQGRVTMTRDTSTSTVYMELSSLRSEDTAVYYCARLGQQLDYWGQGTLVTVSS

SEQ ID NO: 287 - protein, 107 aa, synthetic construct
DIQMTQSPSSLSASVGDRVTITCRASQSIRNYLNWYQQKPGKAPKLLIYEASRLQSGVPSRFSGSGSGTDFTLTISSLQPEDFATYYCQQSYSAPPTFGPGTKVDIK

SEQ ID NO: 288 - protein, 5 aa, synthetic construct
SHYMH

SEQ ID NO: 289 - protein, 7 aa, synthetic construct
LGQQLDY

SEQ ID NO: 290 - protein, 11 aa, synthetic construct
RASQSIRNYLN

SEQ ID NO: 291 - protein, 7 aa, synthetic construct
EASRLQS

SEQ ID NO: 292 - protein, 11 aa, synthetic construct
RASQSISTWLA

SEQ ID NO: 293 - protein, 9 aa, synthetic construct
QQSYSAPPT

SEQ ID NO: 294 - protein, 122 aa, synthetic construct
QVQLVQSGAEVKKPGASVKVSCKASGYTFIGYYMHWVRQAPGQGLEWMGRINPNSGETNYAQKFQGRVTMTRDTSTSTVYMELSSLRSEDTAVYYCARVRVRGVIHPGFDPWGQGTLVTVSS

SEQ ID NO: 295 - protein, 107 aa, synthetic construct
DIQMTQSPSSLSASVGDRVTITCQASQDISNYLNWYQQKPGKAPKLLIYAASSLQSGVPSRFSGSGSGTDFTLTISSLQPEDFATYYCQQSYSTPVTFGPGTKVDIK

SEQ ID NO: 296 - protein, 5 aa, synthetic construct
GYYMH

SEQ ID NO: 297 - protein, 17 aa, synthetic construct
RINPNSGETNYAQKFQG

SEQ ID NO: 298 - protein, 13 aa, synthetic construct
VRVRGVIHPGFDP

SEQ ID NO: 299 - protein, 121 aa, synthetic construct
QVQLVQSGAEVKKPGASVKVSCKASGYTFRNYYIHWVRQAPGQGLEWMGRINPNSGGTNYAQKFQGRVTMTRDTSTSTVYMELSSLRSEDTAVYYCARARIAVAVSGFGYWGQGTLVTVSS

SEQ ID NO: 300 - protein, 107 aa, synthetic construct
DIQMTQSPSSLSASVGDRVTITCQASQDISNYLNWYQQKPGKAPKLLIYAASSLHSGVPSRFSGSGSGTDFTLTISSLQPEDFATYYCQESSSFPYTFGPGTKVDIK

SEQ ID NO: 301 - protein, 5 aa, synthetic construct
NYYIH

SEQ ID NO: 302 - protein, 12 aa, synthetic construct
ARIAVAVSGFGY

SEQ ID NO: 303 - protein, 7 aa, synthetic construct
AASSLHS

SEQ ID NO: 304 - protein, 9 aa, synthetic construct
QESSSFPYT

SEQ ID NO: 305 - protein, 118 aa, synthetic construct
QVQLVQSGAEVKKPGASVKVSCKASGYTFSRWYMHWVRQAPGQGLEWMGRINPNSGGTNYAQKFQGRVTMTRDTSTSTVYMELSSLRSEDTAVYYCARVGGYGWFDPWGQGTLVTVSS

SEQ ID NO: 306 - protein, 107 aa, synthetic construct
DIQMTQSPSSLSASVGDRVTITCQATQDIRNYLNWYQQKPGKAPKLLIYATSSLQSGVPSRFSGSGSGTDFTLTISSLQPEDFATYYCQQSYSPPYTFGQGTKLEIK

SEQ ID NO: 307 - protein, 5 aa, synthetic construct
RWYMH

SEQ ID NO: 308 - protein, 9 aa, synthetic construct
VGGYGWFDP

SEQ ID NO: 309 - protein, 11 aa, synthetic construct
QATQDIRNYLN

SEQ ID NO: 310 - protein, 7 aa, synthetic construct
ATSSLQS

SEQ ID NO: 311 - protein, 9 aa, synthetic construct
QQSYSPPYT

SEQ ID NO: 312 - protein, 121 aa, synthetic construct
QVQLVQSGAEVKKPGASVKVSCKASGYTFSRYFMHWVRQAPGQGLEWMGWINPNSGGTNYAQKFQGRVTMTRDTSTSTVYMELSSLRSEDTAVYYCARVRIGWLQSPPLYWGQGTLVTVSS

SEQ ID NO: 313 - protein, 107 aa, synthetic construct
DIQMTQSPSSLSASVGDRVTITCRASQSISTWLAWYQQKPGKAPKLLIYAASSLQSGVPSRFSGSGSGTDFTLTISSLQPEDFATYYCQQSYGFPWTFGQGTKVEIK

SEQ ID NO: 314 - protein, 9 aa, synthetic construct
QQSYGFPWT

SEQ ID NO: 315 - protein, 120 aa, synthetic construct
QVQLVQSGAEVKKPGASVKVSCKASGYTFTGYFMHWVRQAPGQGLEWMGWMNPNSGNTGYAQKFQGRVTMTRDTSTSTVYMELSSLRSEDTAVYYCVRGRTWIQSSLGYWGQGTLVTVSS

SEQ ID NO: 316 - protein, 107 aa, synthetic construct [sequence omitted]

SEQ ID NO: 317 - protein, 5 aa, synthetic construct
GYFMH

SEQ ID NO: 318 - protein, 11 aa, synthetic construct
GRTWIQSSLGY

SEQ ID NO: 319 - protein, 126 aa, synthetic construct
QVQLVQSGAEVKKPGASVKVSCKASGYTFTGYYLHWVRQAPGQGLEWMGWISAYNGNTNYAQNLQGRVTMTRDTSTSTVYMELSSLRSEDTAVYYCARHSYSGSYSTLPYYGMDVWGQGTTVTVSS

SEQ ID NO: 320 - protein, 107 aa, synthetic construct
DIQMTQSPSSLSASVGDRVTITCRASQGISNYLAWYQQKPGKAPKLLIYTASTLFPGVPSRFSGSGSGTDFTLTISSLQPEDFATYYCQQSYSIPLTFGGGTKVEIK

SEQ ID NO: 321 - protein, 5 aa, synthetic construct
GYYLH

SEQ ID NO: 322 - protein, 17 aa, synthetic construct
WISAYNGNTNYAQNLQG

SEQ ID NO: 323 - protein, 17 aa, synthetic construct
HSYSGSYSTLPYYGMDV

SEQ ID NO: 324 - protein, 11 aa, synthetic construct
RASQGISNYLA

SEQ ID NO: 325 - protein, 7 aa, synthetic construct
TASTLFP

SEQ ID NO: 326 - protein, 121 aa, synthetic construct
QVQLVQSGAEVKKPGASVKVSCKASGYTFTGYYMHWVRQAPGQGLEWMGRINPNSGGTNYAQKFQGRVTMTRDTSTSTVYMELSSLRSEDTAVYYCARERAGYSSGQFDYWGQGTLVTVSS

SEQ ID NO: 327 - protein, 107 aa, synthetic construct
DIQMTQSPSSLSASVGDRVTITCRASQSISNWLAWYQQKPGKAPKLLIYAASTLQNGVPSRFSGSGSGTDFTLTISSLQPEDFATYYCQQSYTFPITFGQGTKVEIK

SEQ ID NO: 328 - protein, 12 aa, synthetic construct
ERAGYSSGQFDY

SEQ ID NO: 329 - protein, 11 aa, synthetic construct
RASQSISNWLA

SEQ ID NO: 330 - protein, 7 aa, synthetic construct
AASTLQN

SEQ ID NO: 331 - protein, 9 aa, synthetic construct
QQSYTFPIT

SEQ ID NO: 332 - protein, 121 aa, synthetic construct
QVQLVQSGAEVKKPGASVKVSCKASGYTFTGYYMHWVRQAPGQGLEWMGWINPNSGGTHYAQKFQGRVTMTRDTSTSTVYMELSSLRSEDTAVYYCARVRIGWLQSPPLYWGQGTLVTVSS

SEQ ID NO: 333 - protein, 107 aa, synthetic construct
DIQMTQSPSSLSASVGDRVTITCRASQGISNYLAWYQQKPGKAPKLLIYATSRLQSGVPSRFSGSGSGTDFTLTISSLQPEDFATYYCQQSYKTPLTFGGGTKVEIK

SEQ ID NO: 334 - protein, 17 aa, synthetic construct
WINPNSGGTHYAQKFQG

SEQ ID NO: 335 - protein, 7 aa, synthetic construct
ATSRLQS

SEQ ID NO: 336 - protein, 9 aa, synthetic construct
QQSYKTPLT

SEQ ID NO: 337 - protein, 121 aa, synthetic construct
QVQLVQSGAEVKKPGASVKVSCKASGYTFTNYYMHWVRQAPGQGLEWMGWINPKSGGTSYAQKFQGRVTMTRDTSTSTVYMELSSLRSEDTAVYYCASGKQWLVGGRFDYWGQGTLVTVSS

SEQ ID NO: 338 - protein, 17 aa, synthetic construct
WINPKSGGTSYAQKFQG

SEQ ID NO: 339 - protein, 12 aa, synthetic construct
GKQWLVGGRFDY

SEQ ID NO: 340 - protein, 119 aa, synthetic construct
QVQLVQSGAEVKKPGASVKVSCKASGYTFTRYYIHWVRQAPGQGLEWMGWMNPNSGNTGFAQKLQGRVTMTRDTSTSTVYMELSSLRSEDTAVYYCARGPFPRGRLDLWGQGTLVTVSS

SEQ ID NO: 341 - protein, 107 aa, synthetic construct
DIQMTQSPSSLSASVGDRVTITCRASQGISRWLGWYQQKPGKAPKLLIYGASNLQTGVPSRFSGSGSGTDFTLTISSLQPEDFATYYCQQSYSSPRTFGQGTKVEIK

SEQ ID NO: 342 - protein, 5 aa, synthetic construct
RYYIH

SEQ ID NO: 343 - protein, 17 aa, synthetic construct
WMNPNSGNTGFAQKLQG

SEQ ID NO: 344 - protein, 10 aa, synthetic construct
GPFPRGRLDL

SEQ ID NO: 345 - protein, 11 aa, synthetic construct
RASQGISRWLG

SEQ ID NO: 346 - protein, 9 aa, synthetic construct
QQSYSSPRT

SEQ ID NO: 347 - protein, 120 aa, synthetic construct
QVQLVQSGAEVKKPGASVKVSCKASGYTFTRYYMHWVRQAPGQGLEWMGIINPTGGSTSYAQKFQGRVTMTRDTSTSTVYMELSSLRSEDTAVYYCARGRTWIQSSLGYWGQGTLVTVSS

SEQ ID NO: 348 - protein, 106 aa, synthetic construct
DIQMTQSPSSLSASVGDRVTITCRASRSINRWLAWYQQKPGKAPKLLIYGASTLQSGVPSRFSGSGSGTDFTLTISSLQPEDFATYYCQQSYSTPTFGGGTKVEIK

SEQ ID NO: 349 - protein, 17 aa, synthetic construct
IINPTGGSTSYAQKFQG

SEQ ID NO: 350 - protein, 11 aa, synthetic construct
RASRSINRWLA

SEQ ID NO: 351 - protein, 7 aa, synthetic construct
GASTLQS

SEQ ID NO: 352 - protein, 8 aa, synthetic construct
QQSYSTPT

SEQ ID NO: 353 - protein, 121 aa, synthetic construct
QVQLVQSGAEVKKPGASVKVSCKASGYTFTSYYMQWVRQAPGQGLEWMGWMNPNSGNTGYAQKFQGRVTMTRDTSTSTVYMELSSLRSEDTAVYYCARVRIGWLQSPPLYWGQGTLVTVSS

SEQ ID NO: 354 - protein, 107 aa, synthetic construct
DIQMTQSPSSLSASVGDRVTITCRASQGISNYLAWYQQKPGKAPKLLIYAASSLQSGVPSRFSGSGSGTDFTLTISSLQPEDFATYYCQQSYSIPFTFGPGTKVDIK

SEQ ID NO: 355 - protein, 5 aa, synthetic construct
SYYMQ

SEQ ID NO: 356 - protein, 120 aa, synthetic construct
QVQLVQSGAEVKKPGASVKVSCKASGYTFTTYYMHWVRQAPGQGLEWMGIINPSGGSTSYAQKFQGRVTMTRDTSTSTVYMELSSLRSEDTAVYYCARGRSWYRSNVDYWGQGTLVTVSS

SEQ ID NO: 357 - protein, 107 aa, synthetic construct
DIQMTQSPSSLSASVGDRVTITCRASQSISSWLAWYQQKPGKAPKLLIYAASSLQSGVPSRFSGSGSGTDFTLTISSLQPEDFATYYCQQSYSTPRTFGQGTRLEIK

SEQ ID NO: 358 - protein, 11 aa, synthetic construct
GRSWYRSNVDY

SEQ ID NO: 359 - protein, 9 aa, synthetic construct
QQSYSTPRT

SEQ ID NO: 360 - protein, 125 aa, synthetic construct
QVQLVQSGAEVKKPGASVKVSCKASGHTFTRYYMHWVRQAPGQGLEWMGWINPNSGNTGDAQKFQGRVTMTRDTSTSTVYMELSSLRSEDTAVYYCARDRGIVVVPAAIGGMDVWGQGTMVTVSS

SEQ ID NO: 361 - protein, 112 aa, synthetic construct
DIVMTQSPLSLPVTPGEPASISCRSSQSLLHSNGYNYLDWYLQKPGQSPQLLIYLGSNRASGVPDRFSGSGSGTDFTLKISRVEAEDVGVYYCMQALQTPITFGQGTRLEIK

SEQ ID NO: 362 - protein, 5 aa, synthetic construct
RYYMH

SEQ ID NO: 363 - protein, 17 aa, synthetic construct
WINPNSGNTGDAQKFQG

SEQ ID NO: 364 - protein, 16 aa, synthetic construct
DRGIVVVPAAIGGMDV

SEQ ID NO: 365 - protein, 9 aa, synthetic construct
MQALQTPIT

SEQ ID NO: 366 - protein, 117 aa, synthetic construct
QVQLVQSGAEVKKPGASVKVSCKASGYTFTGYFMHWVRQAPGQGLEWMGRINPNSGGTNYAQKFQGRVTMTRDTSTSTVYMELSSLRSEDTAVYYCARGKGRYFDLWGRGTLVTVSS

SEQ ID NO: 367 - protein, 112 aa, synthetic construct
DIVMTQSPLSLPVTPGEPASISCRSSQSLLHSNGYNYLDWYLQKPGQSPQLLIYLGSNRASGVPDRFSGSGSGTDFTLKISRVEAEDVGVYYCMQGTHWPITFGQGTRLEIK

SEQ ID NO: 368 - protein, 8 aa, synthetic construct
GKGRYFDL

SEQ ID NO: 369 - protein, 9 aa, synthetic construct
MQGTHWPIT

SEQ ID NO: 370 - protein, 122 aa, synthetic construct
QVQLVQSGAEVKKPGASVKVSCKASGYTFTRYYLHWVRQAPGQGLEWMGWVSAYNGNTNYAQKFQGRVTMTRDTSTSTVYMELSSLRSEDTAVYYCARGYCSGGSCYWFDPWGQGTLVTVSS

SEQ ID NO: 371 - protein, 112 aa, synthetic construct
DIVMTQSPLSLPVTPGEPASISCRSSQSLLHSNGYNYLDWYLQKPGQSPQLLIYLGSNRASGVPDRFSGSGSGTDFTLKISRVEAEDVGVYYCMQALQTPLTFGQGTKVEIK

SEQ ID NO: 372 - protein, 5 aa, synthetic construct
RYYLH

SEQ ID NO: 373 - protein, 17 aa, synthetic construct
WVSAYNGNTNYAQKFQG

SEQ ID NO: 374 - protein, 13 aa, synthetic construct
GYCSGGSCYWFDP

SEQ ID NO: 375 - protein, 9 aa, synthetic construct
MQALQTPLT

SEQ ID NO: 376 - protein, 118 aa, synthetic construct
QVQLVQSGAEVKKPGASVKVSCKASGGTFSSYTLSWVRQAPGQGLEWMGWIHPKSGVTKNAQKFQGRVTMTRDTSTSTVYMELSSLRSEDTAVYYCARGWVYGRMDAWGQGTTVTVSS

SEQ ID NO: 377 - protein, 108 aa, synthetic construct
EIVMTQSPATLSVSPGERATLSCRASQSVSSNYLAWYQQKPGQAPRLLIYGASTRATGIPARFSGSGSGTEFTLTISSLQSEDFAVYYCQQYGTLPYTFGQGTKVEIK

SEQ ID NO: 378 - protein, 5 aa, synthetic construct
SYTLS

SEQ ID NO: 379 - protein, 17 aa, synthetic construct
WIHPKSGVTKNAQKFQG

SEQ ID NO: 380 - protein, 9 aa, synthetic construct
GWVYGRMDA

SEQ ID NO: 381 - protein, 9 aa, synthetic construct
QQYGTLPYT

SEQ ID NO: 382 - protein, 122 aa, synthetic construct
QVQLVQSGAEVKKPGASVKVSCKASGYSFTTYYIHWVRQAPGQGLEWMGIINPSGGSTSYAQKFQGRVTMTRDTSTSTVYMELSSLRSEDTAVYYCARGGYYGSGYNSVGYWGPGTLVTVSS

SEQ ID NO: 383 - protein, 108 aa, synthetic construct
EIVMTQSPATLSVSPGERATLSCRASQSVSSNTLAWYQQKPGQAPRLLIYGASTRATGIPARFSGSGSGTEFTLTISSLQSEDFAVYYCQQYGSSPLTFGPGTKVDIK

SEQ ID NO: 384 - protein, 5 aa, synthetic construct
TYYIH

SEQ ID NO: 385 - protein, 13 aa, synthetic construct
GGYYGSGYNSVGY

SEQ ID NO: 386 - protein, 12 aa, synthetic construct
RASQSVSSNTLA

SEQ ID NO: 387 - protein, 9 aa, synthetic construct
QQYGSSPLT

SEQ ID NO: 388 - protein, 120 aa, synthetic construct
QVQLVQSGAEVKKPGASVKVSCKASGYTFTNYYMHWVRQAPGQGLEWMGWMNPNSGNTGYAQNLQGRVTMTRDTSTSTVYMELSSLRSEDTAVYYCARGRTWFRSGMDVWGQGTTVTVSS

SEQ ID NO: 389 - protein, 106 aa, synthetic construct
EIVMTQSPATLSVSPGERATLSCRASQSVSSYLAWYQQKPGQAPRLLIYGASTRATGIPARFSGSGSGTEFTLTISSLQSEDFAVYYCQQYDISVTFGPGTKVDIK

SEQ ID NO: 390 - protein, 17 aa, synthetic construct
WMNPNSGNTGYAQNLQG

SEQ ID NO: 391 - protein, 8 aa, synthetic construct
QQYDISVT

SEQ ID NO: 392 - protein, 117 aa, synthetic construct
QVQLVQSGAEVKKPGASVKVSCKASGYTFTDYYIHWVRQAPGQGLEWMGWISTYNGNTNYAQKLQGRVTMTRDTSTSTVYMELSSLRSEDTAVYYCARGMVRGMDVWGQGTMVTVSS

SEQ ID NO: 393 - protein, 113 aa, synthetic construct
DIVMTQSPDSLAVSLGERATINCKSSQSVLYSSNNKNYLAWYQQKPGQPPKLLIYWASTRESGVPDRFSGSGSGTDFTLTISSLQAEDVAVYYCQQYYTTPWTFGQGTRLEIK

SEQ ID NO: 394 - protein, 5 aa, synthetic construct
DYYIH

SEQ ID NO: 395 - protein, 17 aa, synthetic construct
WISTYNGNTNYAQKLQG

SEQ ID NO: 396 - protein, 8 aa, synthetic construct
GMVRGMDV

SEQ ID NO: 397 - protein, 9 aa, synthetic construct
QQYYTTPWT

SEQ ID NO: 398 - protein, 118 aa, synthetic construct
QVQLVQSGAEVKKPGASVKVSCKASGYTFTGYRMHWVRQAPGQGLEWMGVINPNTGTARFAQKFQGRVTMTRDTSTSTVYMELSSLRSEDTAVYYCASVGVYWYFDLWGRGTLVTVSS

SEQ ID NO: 399 - protein, 113 aa, synthetic construct
DIVMTQSPDSLAVSLGERATINCKSSQSVLYSSNNKNYLAWYQQKPGQPPKLLIYWASTRESGVPDRFSGSGSGTDFTLTISSLQAEDVAVYYCQQYYSAPLTFGGGTKVEIK

SEQ ID NO: 400 - protein, 5 aa, synthetic construct
GYRMH

SEQ ID NO: 401 - protein, 17 aa, synthetic construct
VINPNTGTARFAQKFQG

SEQ ID NO: 402 - protein, 9 aa, synthetic construct
VGVYWYFDL

SEQ ID NO: 403 - protein, 9 aa, synthetic construct
QQYYSAPLT

SEQ ID NO: 404 - protein, 121 aa, synthetic construct
QVQLVQSGAEVKKPGASVKVSCKASGYTFTGYYMHWVRQAPGQGLEWMGMINPSGGGTTYAQKFQGRVTMTRDTSTSTVYMELSSLRSEDTAVYYCARDRRSMITFRTDYWGQGTLVTVSS

SEQ ID NO: 405 - protein, 113 aa, synthetic construct
DIVMTQSPDSLAVSLGERATINCKSSQSVLYSSNNKNYLAWYQQKPGQPPKLLIYWASTRESGVPDRFSGSGSGTDFTLTISSLQAEDVAVYYCQQYYSTPYTFGQGTKLEIK

SEQ ID NO: 406 - protein, 17 aa, synthetic construct
MINPSGGGTTYAQKFQG

SEQ ID NO: 407 - protein, 12 aa, synthetic construct
DRRSMITFRTDY

SEQ ID NO: 408 - protein, 9 aa, synthetic construct
QQYYSTPYT

SEQ ID NO: 409 - protein, 123 aa, synthetic construct
QVQLVQSGAEVKKPGASVKVSCKASGYTFTGYYMHWVRQAPGQGLEWMGWMNPNSGNTGYAQKFQGRVTMTRDTSTSTVYMELSSLRSEDTAVYYCAGRKWLGLDFYNWFDPWGQGTLVTVSS

SEQ ID NO: 410 - protein, 113 aa, synthetic construct
DIVMTQSPDSLAVSLGERATINCKSSQSVLYSSNNKNYLAWYQQKPGQPPKLLIYWASTRQSGVPDRFSGSGSGTDFTLTISSLQAEDVAVYYCQQYYSTPWTFGQGTKVEIK

SEQ ID NO: 411 - protein, 14 aa, synthetic construct
RKWLGLDFYNWFDP

SEQ ID NO: 412 - protein, 7 aa, synthetic construct
WASTRQS

SEQ ID NO: 413 - protein, 9 aa, synthetic construct
QQYYSTPWT

SEQ ID NO: 414 - protein, 116 aa, synthetic construct
QVQLVQSGAEVKKPGSSVKVSCKASGGTFSSYAISWVRQAPGQGLEWVGGIMPIFGTANYAQKFQGRVTITADESPSTAYMELSSLRSEDTAVYYCATGRRELLNWGQGTLVTVSS

SEQ ID NO: 415 - protein, 108 aa, synthetic construct
EIVMTQSPATLSVSPGERATLSCRASQSVNSRFLAWYQQKPGQAPRLLIYGASTRATGIPARFSGSGSGTEFTLTISSLQSEDFAVYYCMQGTHWPYTFGQGTKVEIK

SEQ ID NO: 416 - protein, 17 aa, synthetic construct
GIMPIFGTANYAQKFQG

SEQ ID NO: 417 - protein, 7 aa, synthetic construct
GRRELLN

SEQ ID NO: 418 - protein, 12 aa, synthetic construct
RASQSVNSRFLA

SEQ ID NO: 419 - protein, 9 aa, synthetic construct
MQGTHWPYT

SEQ ID NO: 420 - protein, 117 aa, synthetic construct
QVQLVQSGAEVKKPGSSVKVSCKASGYTFTSYDINWVRQAPGQGLEWMGGIIPIFGTANYAQKFQGRVTITADESTSTAYMELSSLRSEDTAVYYCATTPGDAFDIWGQGTMVTVSS

SEQ ID NO: 421 - protein, 113 aa, synthetic construct
DIVMTQSPDSLAVSLGERATINCKSSQSVLYSSNNKNYLAWYQQKPGQPPKLLIYWASTRESGVPDRFSGSGSGTDFTLTISSLQAEDVAVYYCQQYSDTPLTFGQGTKVEIK

SEQ ID NO: 422 - protein, 8 aa, synthetic construct
TPGDAFDI

SEQ ID NO: 423 - protein, 9 aa, synthetic construct
QQYSDTPLT

SEQ ID NO: 424 - protein, 116 aa, synthetic construct
EVQLLESGGGLVKPGGSLRLSCAASGFTFSSSWMHWVRQAPGKGLEWVSAIGTAGDTYYPGSVKGRFTISRDDSKNTLYLQMNSLKTEDTAVYYCARVRLGHFDLWGRGTLVTVSS

SEQ ID NO: 425 - protein, 107 aa, synthetic construct
DIQMTQSPSSLSASVGDRVTITCRASQSISRYLNWYQQKPGKAPKLLIYAASSLQSGVPSRFSGSGSGTDFTLTISSLQPEDFATYYCQQSYSNPPTFGQGTKLEIK

SEQ ID NO: 426 - protein, 5 aa, synthetic construct
SSWMH

SEQ ID NO: 427 - protein, 16 aa, synthetic construct
AIGTAGDTYYPGSVKG

SEQ ID NO: 428 - protein, 8 aa, synthetic construct
VRLGHFDL

SEQ ID NO: 429 - protein, 9 aa, synthetic construct
QQSYSNPPT

SEQ ID NO: 430 - protein, 119 aa, synthetic construct
EVQLLESGGGLVQHGGSLRLSCAASGFAFSSYVLHWVRQAPGKGLEWVSSISSSSSYIYYADSVKGRFTISRDNSKNTLYLQMNSLRAEDTAVYYCARGDRYPGLPNYWGQGTLVTVSS

SEQ ID NO: 431 - protein, 107 aa, synthetic construct
DIQMTQSPSSLSASVGDRVTITCRASQGISSWLAWYQQKPGKAPKLLIYQASNKDTGVPSRFSGSGSGTDFTLTISSLQPEDFATYYCQQSYRIPWTFGQGTKVEIK

SEQ ID NO: 432 - protein, 5 aa, synthetic construct
SYVLH

SEQ ID NO: 433 - protein, 17 aa, synthetic construct
SISSSSSYIYYADSVKG

SEQ ID NO: 434 - protein, 10 aa, synthetic construct
GDRYPGLPNY

SEQ ID NO: 435 - protein, 7 aa, synthetic construct
QASNKDT

SEQ ID NO: 436 - protein, 9 aa, synthetic construct
QQSYRIPWT

SEQ ID NO: 437 - protein, 120 aa, synthetic construct
EVQLLESGGGLVQPGGSLRLSCAASGFAFSGTWMQWVRQAPGKGLEWVSDISGSSRDTNYADSVKGRFTISRDNSKNTLYLQMNSLRAEDTAVYYCAKDHWDSYGYLDYWGQGTLVTVSS

SEQ ID NO: 438 - protein, 107 aa, synthetic construct
DIQMTQSPSSLSASVGDRVTITCRASQSISGWLAWYQQKPGKAPKLLIYAASTLRDGVPSRFSGSGSGTDFTLTISSLQPEDFATYYCQQANSFPLTFGQGTKVEIK

SEQ ID NO: 439 - protein, 5 aa, synthetic construct
GTWMQ

SEQ ID NO: 440 - protein, 17 aa, synthetic construct
DISGSSRDTNYADSVKG

SEQ ID NO: 441 - protein, 11 aa, synthetic construct
DHWDSYGYLDY

SEQ ID NO: 442 - protein, 11 aa, synthetic construct
RASQSISGWLA

SEQ ID NO: 443 - protein, 7 aa, synthetic construct
AASTLRD

SEQ ID NO: 444 - protein, 9 aa, synthetic construct
QQANSFPLT

SEQ ID NO: 445 - protein, 118 aa, synthetic construct
EVQLLESGGGLVQPGGSLRLSCAASGFMFDYYAMHWVRQAPGKGLEWVSLISYDGRNKYYADSVKGRFTISRDNSKNTLYLQMNSLRAEDTAVYYCARPGSYSRFQHWGQGTLVTVSS

SEQ ID NO: 446 - protein, 107 aa, synthetic construct
DIQMTQSPSSLSASVGDRVTITCRASQGISNNLNWYQQKPGKAPKLLIYAASSLQSGVPSRFSGSGSGTDFTLTISSLQPEDFATYYCQQANNFPITFGQGTKVEIK

SEQ ID NO: 447 - protein, 5 aa, synthetic construct
YYAMH

SEQ ID NO: 448 - protein, 17 aa, synthetic construct
LISYDGRNKYYADSVKG

SEQ ID NO: 449 - protein, 9 aa, synthetic construct
PGSYSRFQH

SEQ ID NO: 450 - protein, 11 aa, synthetic construct
RASQGISNNLN

SEQ ID NO: 451 - protein, 9 aa, synthetic construct
QQANNFPIT

SEQ ID NO: 452 - protein, 121 aa, synthetic construct
EVQLLESGGGLVQPGGSLRLSCAASGFTFGAYVMHWVRQAPGKGLEWVSSISGGSTYYADSVKGRFTISRDNSKNTLYLQMNSLRAEDTAVYYCARHPVRGVIGAGWFDPWGQGTLVTVSS

SEQ ID NO: 453 - protein, 107 aa, synthetic construct
DIQMTQSPSSLSASVGDRVTITCRASQNISRWLAWYQQKPGKAPKLLIYAASSLQSGVPSRFSGSGSGTDFTLTISSLQPEDFATYYCQQAISFPLTFGGGTKVEIK

SEQ ID NO: 454 - protein, 5 aa, synthetic construct
AYVMH

SEQ ID NO: 455 - protein, 15 aa, synthetic construct
SISGGSTYYADSVKG

SEQ ID NO: 456 - protein, 14 aa, synthetic construct
HPVRGVIGAGWFDP

SEQ ID NO: 457 - protein, 11 aa, synthetic construct
RASQNISRWLA

SEQ ID NO: 458 - protein, 121 aa, synthetic construct
EVQLLESGGGLVQPGGSLRLSCAASGFTFSSYAMHWVRQAPGKGLEWLAVISFDGSIRHYADSVKGRFTISRDNSKNTLYLQMNSLRAEDTAVYYCAKPKASSGPRLIDYWGQGTLVTVSS

SEQ ID NO: 459 - protein, 107 aa, synthetic construct
DIQMTQSPSSLSASVGDRVTITCRASQGISNSLAWYQQKPGKAPKLLIYSAVNLQSGVPSRFSGSGSGTDFTLTISSLQPEDFATYYCQQANSFPLTFGGGTKVEIK

SEQ ID NO: 460 - protein, 17 aa, synthetic construct
VISFDGSIRHYADSVKG

SEQ ID NO: 461 - protein, 12 aa, synthetic construct
PKASSGPRLIDY

SEQ ID NO: 462 - protein, 11 aa, synthetic construct
RASQGISNSLA

SEQ ID NO: 463 - protein, 7 aa, synthetic construct
SAVNLQS

SEQ ID NO: 464 - protein, 9 aa, synthetic construct
QQANSFPLT

SEQ ID NO: 465 - protein, 123 aa, synthetic construct
EVQLLESGGGLVQPGGSLRLSCAASGFTFSSYAMHWVRQAPGKGLEWVSSISSSSTYIHYADSVKGRFTISRDNSKNTLYLQMNSLRAEDTAVYYCARVGRYYGSGSSLVDYWGQGTLVTVSS

SEQ ID NO: 466 - protein, 107 aa, synthetic construct
DIQMTQSPSSLSASVGDRVTITCRASQSVSSWLAWYQQKPGKAPKLLIYDASSLQSGVPSRFSGSGSGTDFTLTISSLQPEDFATYYCQQAKSFPPTFGQGTKVEIK

SEQ ID NO: 467 - protein, 17 aa, synthetic construct
SISSSSTYIHYADSVKG

SEQ ID NO: 468 - protein, 14 aa, synthetic construct
VGRYYGSGSSLVDY

SEQ ID NO: 469 - protein, 11 aa, synthetic construct
RASQSVSSWLA

SEQ ID NO: 470 - protein, 7 aa, synthetic construct
DASSLQS

SEQ ID NO: 471 - protein, 9 aa, synthetic construct
QQAKSFPPT

SEQ ID NO: 472 - protein, 126 aa, synthetic construct
EVQLLESGGGLVQPGGSLRLSCAASGFTFSSYAMSWVRQAPGKGLEWVSSISSASSYKYYADSVKGRFTISRDNSKNTLYLQMNSLRAEDTAVYYCARDIYSSGWRGYYYYGMDVWGQGTTVTVSS

SEQ ID NO: 473 - protein, 107 aa, synthetic construct
DIQMTQSPSSLSASVGDRVTITCRASQGIRNDLNWYQQKPGKAPKLLIYAATRLQSGVPSRFSGSGSGTDFTLTISSLQPEDFATYYCQQAHSFPYSFGQGTRLEIK

SEQ ID NO: 474 - protein, 5 aa, synthetic construct
SYAMS

SEQ ID NO: 475 - protein, 17 aa, synthetic construct
SISSASSYKYYADSVKG

SEQ ID NO: 476 - protein, 17 aa, synthetic construct
DIYSSGWRGYYYYGMDV

SEQ ID NO: 477 - protein, 11 aa, synthetic construct
RASQGIRNDLN

SEQ ID NO: 478 - protein, 7 aa, synthetic construct
AATRLQS

SEQ ID NO: 479 - protein, 9 aa, synthetic construct
QQAHSFPYS

SEQ ID NO: 480 - protein, 122 aa, synthetic construct
EVQLLESGGGLVQPGGSLRLSCAASGFTFSSYAMSWVRQAPGKGLEWVSAISGSGGNAYYADSVKGRFTISRDNAKNSLYLQMNSLRAEDTAVYYCAKNSWGSYRPRAFDIWGQGTMVTVSS

SEQ ID NO: 481 - protein, 113 aa, synthetic construct
DIVMTQSPDSLAVSLGERATINCKSSQSVLYSSNNKNYLAWYQQKPGQPPKLLIYWASTRASGVPDRFSGSGSGTDFTLTISSLQAEDVAVYYCQQYLSLPYTFGQGTKVEIK

SEQ ID NO: 482 - protein, 17 aa, synthetic construct
AISGSGGNAYYADSVKG

SEQ ID NO: 483 - protein, 13 aa, synthetic construct
NSWGSYRPRAFDI

SEQ ID NO: 484 - protein, 7 aa, synthetic construct
WASTRAS

SEQ ID NO: 485 - protein, 9 aa, synthetic construct
QQYLSLPYT

SEQ ID NO: 486 - protein, 121 aa, synthetic construct
QVQLVQSGAEVKKPGASVKVSCKASGNIFTAQYMHWVRQAPGQGLEWMGWMNPNTVYTGSAQKFQGRVTMTRDTSTSTVYMELSSLRSEDTAVYYCARDWVGDGYNSFDYWGQGTLVTVSS

SEQ ID NO: 487 - protein, 113 aa, synthetic construct
DIVMTQSPDSLAVSLGERATINCKSSQSVLYSSNNKNYLAWYQQKPGQPPKLLIYWASTRESGVPDRFSGSGSGTDFTLTISSLQAEDVAVYYCQQYYTTPFTFGPGTKVDIK

SEQ ID NO: 488 - protein, 5 aa, synthetic construct
AQYMH

SEQ ID NO: 489 - protein, 17 aa, synthetic construct
WMNPNTVYTGSAQKFQG

SEQ ID NO: 490 - protein, 12 aa, synthetic construct
DWVGDGYNSFDY

SEQ ID NO: 491 - protein, 9 aa, synthetic construct
QQYYTTPFT

SEQ ID NO: 492 - protein, 122 aa, synthetic construct
EVQLLESGGGLVQPGGSLRLSCAASGFTFSSYGMNWVRQAPGKGLEWVSAISGSGGRTYYADSVKGRFTISRDNAKNSLYLQMNSLRAEDTAVYYCAKGTYYSSPKYSFDYWGQGTLVTVSS

SEQ ID NO: 493 - protein, 107 aa, synthetic construct
DIQMTQSPSSLSASVGDRVTITCRASQDIKNFLAWYQQKPGKAPKLLIYAASSLQSGVPSRFSGSGSGTDFTLTISSLQPEDFATYYCQQSYSTPWTFGQGTKLEIK

SEQ ID NO: 494 - protein, 5 aa, synthetic construct
SYGMN

SEQ ID NO: 495 - protein, 17 aa, synthetic construct
AISGSGGRTYYADSVKG

SEQ ID NO: 496 - protein, 13 aa, synthetic construct
GTYYSSPKYSFDY

SEQ ID NO: 497 - protein, 11 aa, synthetic construct
RASQDIKNFLA

SEQ ID NO: 498 - protein, 9 aa, synthetic construct
QQSYSTPWT

SEQ ID NO: 499 - protein, 131 aa, synthetic construct
EVQLLESGGGLVQPGGSLRLSCAASGLTFSSYQMSSVSQAPGKGLEWVSYISSAANTVYYADSVKGRFTISRDNSKNTLYLQMNSLRAEDTAVYYCAREDESRSPYCSGGSCYRAEYFQHWGQGTLVTVSS

SEQ ID NO: 500 - protein, 107 aa, synthetic construct
DIQMTQSPSSLSASVGDRVTITCRASQGISNYLAWYQQKPGKAPKLLIYAASSLQSGVPSRFSGSGSGTDFTLTISSLQPEDFATYYCQQSYSTPLTFGPGTKVDIK

SEQ ID NO: 501 - protein, 5 aa, synthetic construct
SYQMS

SEQ ID NO: 502 - protein, 17 aa, synthetic construct
YISSAANTVYYADSVKG

SEQ ID NO: 503 - protein, 22 aa, synthetic construct
EDESRSPYCSGGSCYRAEYFQH

SEQ ID NO: 504 - protein, 237 aa, synthetic construct
QVQLVQSGAEVKKPGSSVKVSCKASGYTFTDYYMHWVRQAPGQGLEWMGGIIPIFGTANYAQKFQGRVTITADESTSTAYMELSSLRSEDTAVYYCAKEGANGYWGQGTLVTVSSGGGGSGGGGSGGGGSDIQMTQSPSSLSASVGDRVTITCQASQDISNYLNWYQQKPGKAPKLLIYKASSLESGVPSRFSGSGSGTDFTLTISSLQPEDFATYYCQQSSRIPPTFGQGTKVEIK

SEQ ID NO: 505 - protein, 249 aa, synthetic construct
EVQLLESGGGLVQPGGSLRLSCAASGFTFSDYYMSWVRQAPGKGLEWVSYISGSGDAIYYADSVKGRFTISRDNSKNTLYLQMNSLRAEDTAVYYCARDRSDCGGDDRFLCDGYFDLWGRGTLVSLSGGGGSGGGGSGGGGSDIQMTQSPSSLSASVGDRVTITCRASQSTNNYVNWYQQKPGKAPKLLIYAASSLQSGVPSRFSGSGSGTDFTLTISSLQPEDFATYYCQQSYSIPLTFGPGTKVDIK

SEQ ID NO: 506 - protein, 254 aa, synthetic construct
QVQLVQSGAEVKKPGSSVKVSCKASGYTFTSYDINWVRQAPGQGLEWMGGIIPIFGTTKFAQKFQGRVTITADESTSTAYMELSSLRSEDTAVYYCARDWYSSSWYNGDRGDWFDPWGQGTLVTVSSGGGGSGGGGSGGGGSDIVMTQSPLSLPVTPGEPASISCRSSGSLLHSNGYNYLDWYLQKPGQSPQLLIYAASSLQSGVPDRFSGSGSGTDFTLKISRVEAEDVGVYYCMQGTHWPGTFGQGTKVEIK

SEQ ID NO: 507 - protein, 249 aa, synthetic construct
QVQLVQSGAEVKKPGASVKVSCKASGYFFTTYYLHWVRQAPGQGLEWMGVINPNSRLTSYAESFQGRVTMTRDTSTSTVYMELSSLRSEDTAVYYCEREMFPSSYGIDVWGQGTTVTVSSGGGGSGSGGGGSGGGGSDIVMTQSPLSLPVTPGEPASISCRSSQSLLHSNGYNYLDWYLQKPGQSPQLLIYAASTLQSGVPDRFSGSGSGTDFTLKISRVEAEDVGVYYCMQGTHWPPTFGQGTKLEIK

SEQ ID NO: 508 - protein, 246 aa, synthetic construct
QVQLVQSGAEVKKPGSSVKVSCKASGYTFTSYYMHWVRQAPGQGLEWMGRIIPILGATDYAQKFQGRVTITADESTSTAYMELSSLRSEDTAVYYCARAGYSSIAARPAFWGQGTLVTVSSGGGGSGSGGGGSGGGGSEIVMTQSPATLSVSPGERATLSCRASQSVSSNLAWYQQKPGQAPRLLIYGASTRATGIPARFSGSGSGTEFTLTISSLQSEDFAVYYCQQYYSPFPLTFGGGTKVEIK

SEQ ID NO: 509 - protein, 256 aa, synthetic construct
QVQLVQSGAEVKKPGASVKVSCKASGYTFTSYYMHWVRQAPGQGLEWLGIINPSDYTTSYAQKFQGRVTMTRDTSTSTVYMELSSLRSEDTAVYYCARVASSSWYPGDENWYFDLWGRGTLVTVSSGGGGSGSGGGGSGGGGSDIVMTQSPDSLAVSLGERATINCKSSQSVLYSSNNKNYLAWYQQKPGQPPKLLIYWASTRESGVPDRFSGSGSGTDFTLTISSLQAEDVAIYYCQQYYAIPWTFGQGTKVEIK

SEQ ID NO: 510 - protein, 241 aa, synthetic construct
QVQLVQSGAEVKKPGASVKVSCKASGYTFSRYFMHWVRQAPGQGLEWVGWINPNSGNTGYAQKFQGRVTMTRDTSTSTVYMELSSLRSEDTAVYYCARVVTGGRLDVWGQGTTVTVSSGGGGSGGGGSGGGGSEIVMTQSPATLSVSPGERATLSCRASQRVSNNYLAWYQQKPGQAPRLLIYGASTRASGIPARFSGSGSGTEFTLTISSLQSEDFAVYYCQQYGSTPYTFGQGTKVEIK

SEQ ID NO: 511 - protein, 243 aa, synthetic construct
QVQLVQSGAEVKKPGASVKVSCKASGYRFTSQYMHWVRQAPGQGLEWMGIINPSGGSTSYAQKFQGRVTMTRDTSTSTVYMELSSLRSEDTAVYYCARGRIAVAGHPLGYWGQGTLVTVSSGGGGSGGGGSGGGGSDIQMTQSPSSLSASVGDRVTITCRASQSISSWLAWYQQKPGKAPKLLIYGASSLQSGVPSRFSGSGSGTDFTLTISSLQPEDFATYYCQQANSFPPTFGGGTKVEIK

SEQ ID NO: 512 - protein, 242 aa, synthetic construct
QVQLVQSGAEVKKPGASVKVSCKASGYTFTRYYMHWVRQAPGQGLEWMGWINPNSGGTNYAQKFQGRVTMTRDTSTSTVYMELSSLRSEDTAVYYCARGGSWGSGPLGYWGQGTLVTVSSGGGGSGGGGSGGGGSDIQMTQSPSSLSASVGDRVTITCQASQDISRFLHWYQQKPGKAPKLLIYGASNLKSGVPSRFSGSGSGTDFTLTISSLQPEDFATYYCQQSYSTPPTFGGGTKVEIK

SEQ ID NO: 513 - protein, 243 aa, synthetic construct
QVQLVQSGAEVKKPGASVKVSCKASGYTFTSYYMHWVRQAPGQGLEWMGIINPSGAGTTYGHNFQGRVTMTRDTSTSTVYMELSSLRSEDTAVYYCARGPRDTAMVRFDYWGQGTLVTVSSGGGGSGGGGSGGGGSEIVMTQSPATLSVSPGERATLSCRASQSVSSYLAWYQQKPGQAPRLLIYGASTRATGIPARFSGSGSGTEFTLTISSLQSEDFAVYYCQQYGSSPGTFGQGTKLEIK

SEQ ID NO: 514 - protein, 238 aa, synthetic construct
QVQLVQSGAEVKKPGASVKVSCKASGGTFSNYAISWVRQAPGQGLEWVGRINPNSGGTNYAQKFQGRVTMTRDTSTSTVYMELSSLRSEDTAVYYCARGRYSSSSWGQGTLVTVSSGGGGSGGGGSGGGGSDIQMTQSPSSLSASVGDRVTITCRASQSINNYLNWYQQKPGKAPKLLIYAASSLQSGVPSRFSGSGSGTDFTLTISSLQPEDFATYYCQQSYSTKWTFGQGTKVEIK

SEQ ID NO: 515 - protein, 242 aa, synthetic construct
QVQLVQSGAEVKKPGASVKVSCKASGYTFSNYYIHWVRQAPGQGLEWMGWINPNSGDTNYAQKFQGRVTMTRDTSTSTVYMELSSLRSEDTAVYYCARGMTWRTSAATYWGQGTLVTVSSGGGGSGGGGSGGGGSDIQMTQSPSSLSASVGDRVTITCRASQGISRWLAWYQQKPGKAPKLLIYGASNLQTGVPSRFSGSGSGTDFTLTISSLQPEDFATYYCQQSYSTPPTFGPGTKVDIK

SEQ ID NO: 516 - protein, 244 aa, synthetic construct
QVQLVQSGAEVKKPGASVKVSCKASGYTFTNYYMHWVRQAPGQGLEWMGWISAYNGNTNYAQKLQGRVTMTRDTSTSTVYMELSSLRSEDTAVYYCATASGWGHSNSAGYWGQGTLVTVSSGGGGSGGGGSGGGGSEIVMTQSPATLSVSPGERATLSCRASQSVNGNYLAWYQQKPGQAPRLLIYGVSSRASGIPARFSGSGSGTEFTLTISSLQSEDFAVYYCQQYGSSPYTFGQGTKVEIK

SEQ ID NO: 517 - protein, 243 aa, synthetic construct
EVQLLESGGGLVQPGGSLRLSCAASGFTFSNHYMSWVRQAPGKGLEWVSAISGSGGSTYYADSVKGRFTISRDNSKNTLYLQMNSLRAGDTAVYYCARDRYRWGRGYFQHWGQGTLVTVSSGGGGSGGGGSGGGGSDIQMTQSPSSLSASVGDRVTITCRASQRISTYLNWYQQKPGKAPKLLIYSASTLQAGVPSRFSGSGSGTDFTLTISSLQPEDFATYYCQQAYSLPWTFGQGTKLEIK

SEQ ID NO: 518 - protein, 243 aa, synthetic construct
QVQLVQSGAEVKKPGASVKVSCKASGYTFTRYYMHWVRQAPGQGLEWMGWINPNSGVTNFAQKFQGRVTMTRDTSTSTVYMELSSLRSEDTAVYYCARVRIGWLQSPPLYWGQGTLVTVSSGGGGSGGGGSGGGGSDIQMTQSPSSLSASVGDRVTITCRASQSINTWLAWYQQKPGKAPKLLIYAASSLQSGVPSRFSGSGSGTDFTLTISSLQPEDFATYYCQQAISFPLTFGGGTKVEIK

SEQ ID NO: 519 - protein, 241 aa, synthetic construct
QVQLVQSGAEVKKPGASVKVSCKASGYTFSRHYMHWVRQAPGQGLEWMGRINPNSGGTNYAQKFQGRVTMTRDTSTSTVYMELSSLRSEDTAVYYCARSIYGDYWFDPWGQGTLVTVSSGGGGSGGGGSGGGGSDIQMTQSPSSLSASVGDRVTITCRASQSINRWLAWYQQKPGKAPKLLIYGASNLQSGVPSRFSGSGSGTDFTLTISSLQPEDFATYYCQQANSFPYTFGQGTKLEIK

SEQ ID NO: 520 - protein, 239 aa, synthetic construct
QVQLVQSGAEVKKPGASVKVSCKASGYTFTSYYIHWVRQAPGQGLEWMGWMSPNSGDTGYAQKFQGRVTMTRDTSTSTVYMELSSLRSEDTAVYYCARLVRGGFDYWGQGTLVTVSSGGGGSGGGGSGGGGSDIQMTQSPSSLSASVGDRVTITCRASQGISSYLNWYQQKPGKAPKLLIYAASRLQSGVPSRFSGSGSGTDFTLTISSLQPEDFATYYCQQSYRSPPTFGQGTKLEIK

SEQ ID NO: 521 - protein, 250 aa, synthetic construct
QVQLVQSGAEVKKPGASVKVSCKASGYTFTSSGINWVRQAPGQGLEWMGWINPNSGGAKYAQRFQGRVTMTRDTSTSTVYMELSSLRSEDTAVYYCARARGYSGSKRDFQHWGQGTLVTVSSGGGGSGGGGSGGGGSDIVMTQSPDSLAVSLGERATINCKSSQSVLYSSNNKNYLAWYQQKPGQPPKLLIYWASTRESGVPDRFSGSGSGTDFTLTISSLQAEDVAVYHCQQYYNTPFTFGPGTKVDIK

SEQ ID NO: 522 - protein, 245 aa, synthetic construct
QVQLVQSGAEVKKPGASVKVSCKASGYTFNRKFMHWVRQAPGQGLEWMGWMNPNNGATNYAQKFQGRVTMTRDTSTSTVYMELSSLRSEDTAVYYCARGRGYYGSGSYYGDYWGQGTLVTVSSGGGGSGGGGSGGGGSDIQMTQSPSSLSASVGDRVTITCRASQSISRYLNWYQQKPGKAPKLLIYGASNLQSGVPSRFSGSGSGTDFTLTISSLQPEDFATYYCQQSYSTPPTFGPGTKVDIK

SEQ ID NO: 523 - protein, 238 aa, synthetic construct
QVQLVQSGAEVKKPGASVKVSCKASGYTFTRYYMHWVRQAPGQGLEWMGWMNPNSGNAGYAQKLQGRVTMTRDTSTSTVYMELSSLRSEDTAVYYCARGYNWFDPWGQGTLVTVSSGGGGSGGGGSGGGGSDIQMTQSPSSLSASVGDRVTITCRASQNIATYLSWYQQKPGKAPKLLIYGASALRSGVPSRFSGSGSGTDFTLTISSLQPEDFATYYCLQHNTYPLTFGGGTKVEIK

SEQ ID NO: 524 - protein, 239 aa, synthetic construct
QVQLVQSGAEVKKPGASVKVSCKASGYSFSGYYLHWVRQAPGQGLEWMGWMNPDSGNTGYAQNFQGRVTMTRDTSTSTVYMELSSLRSEDTAVYYCARLHRGGHDYWGQGTLVTVSSGGGGSGGGGSGGGGSDIQMTQSPSSLSASVGDRVTITCRASQSISRYLNWYQQKPGKAPKLLIYAASTLQSGVPSRFSGSGSGTDFTLTISSLQPEDFATYYCQQSYSTPVTFGQGTRLEIK

SEQ ID NO: 525 - protein, 243 aa, synthetic construct
QVQLVQSGAEVKKPGASVKVSCKASGYTFTSYYMHWVRQAPGQGLEWMGRINPHSGDADFVDKFQGRVTMTRDTSTSTVYMELSSLRSEDTAVYYCARDRRGYGGNSLDYWGQGTLVTVSSGGGGSGGGGSGGGGSDIQMTQSPSSLSASVGDRVTITCRAGQNIKRYLNWYQQKPGKAPKLLIYAASSLQSGVPSRFSGSGSGTDFTLTISSLQPEDFATYYCQQSYSSPLTFGGGTKVEIK

SEQ ID NO: 526 - protein, 243 aa, synthetic construct
QVQLVQSGAEVKKPGASVKVSCKASGYTFTRNYLHWVRQAPGQGLEWMGIINPSGGSTTYAQKFQGRVTMTRDTSTSTVYMELSSLRSEDTAVYYCARGRTWFRSGMDVWGQGTTVTVSSGGGGSGGGGSGGGGSEIVMTQSPATLSVSPGERATLSCRASQSVGNYLAWYQQKPGQAPRLLIYGASTRATGIPARFSGSGSGTEFTLTISSLQSEDFAVYYCQQYHSSPPYTFGQGTKVEIK

SEQ ID NO: 527 - protein, 242 aa, synthetic construct
QVQLVQSGAEVKKSGASVKVSCKASGYTFTSYYMHWVRQAPGQGLEWMGVINPSGGTTSYAQKFQGRVTMTRETSTSTVYMELSSLRSEDTAVYYCARGRGWLRSALGYWGQGTLVTVSSGGGGSGGGGSGGGGSDIQMTQSPSSLSASVGDRVTITCRASQSISSWLAWYQQKPGKAPKLLIYAASTLQSGVPSRFSGSGSGTDFTLTISSLQPEDFATYYCQQSYNTPYTFGQGTKLEIK

SEQ ID NO: 528 - protein, 250 aa, synthetic construct
QVQLVQSGAEVKKPGASVKVSCKASGGRFSTYALSWVRQAPGQGLEWMGWINPNSGGTNYAQKFQGRVTMTRDTSTSTVYMELSSLRSEDTAVYYCAKSLWWSPSHYYYYGMDVWGQGTTVTVSSGGGGSGGGGSGGGGSEIVMTQSPATLSVSPGERATLSCRASQSVSSNYLAWYQQKPGQAPRLLIYGISTRASGIPARFSGSGSGTEFTLTISSLQSEDFAVYYCQQRSNWPPSITFGQGTRLEIK

SEQ ID NO: 529 - protein, 240 aa, synthetic construct
EVQLLESGGGLVQPGGSLRLSCAASGFTFSSYAMHWVRQAPGKGLEWVAVIWYDGSSKYYADSVKGRFTISRDNSKNTLYLQMNSLRAEDTAVYYCARGEVRRGFQHWGQGTLVTVSSGGGGSGGGGSGGGGSDIQMTQSPSSLSASVGDRVTITCRASQNVGSWLAWYQQKPGKAPKLLIYAASSLQSGVPSRFSGSGSGTDFTLTIRSLQPEDFATYYCQQSYSTPITFGQGTRLEIK

SEQ ID NO: 530 - protein, 242 aa, synthetic construct
QVQLVQSGAEVKKPGASVKVSCKASGYTFSRYYMHWVRQAPGQGLEWMGWMNPNSGDTGYAQKFQGRVTMTRDTSTSTVYMELSSLRSEDTAVYYCAKGREWLRSPFDYWGQGTLVTVSSGGGGSGGGGSGGGGSDIQMTQSPSSLSASVGDRVTITCRASQSISTWLAWYQQKPGKAPKLLIYAASSLQSGVPSRFSGSGSGTDFTLTISSLQPEDFATYYCQQLSSYPLTFGQGTKVEIK

SEQ ID NO: 531 - protein, 241 aa, synthetic construct
QVQLVQSGAEVKKPGASVKVSCKASGYTFTGYYMHWVRQAPGQGLEWMGWMNPNSGNTGYAQKFQGRVTMTRDTSTSTVYMELSSLRSEDTAVYYCARLRAKGGGFDYWGQGTLVTVSSGGGGSGGGGSGGGGSDIQMTQSPSSLSASVGDRVTITCRASQGIGNYLAWYQQKPGKAPKLLIYAASSLESGVPSRFSGSGSGTDFTLTISSLQPEDFATYYCQQGYRFPPTFGPGTKVDIK

SEQ ID NO: 532 - protein, 250 aa, synthetic construct
QVQLVQSGAEVKKPGASVKVSCKASGYTFANYNIHWVRQAPGQGLEWMGWMNPNSGNTGYAQKFQGRVTMTRDTSTSTVYMELSSLRSEDTAVYYCARPRYSSGWYGWYFDLWGRGTLVTVSSGGGGSGGGGSGGGGSDIVMTQSPLSLPVTPGEPASISCRSSQSLLHSNGYNYLDWYLQKPGQSPQLLIYLGSNRASGVPDRFSGSGSGTDFTLKISRVEAEDVGVYYCMQSTYWPPTFGQGTKLEIK

SEQ ID NO: 533 - protein, 243 aa, synthetic construct
QVQLVQSGAEVKKPGASVKVSCKASGYTFTTYYMHWVRQAPGQGLEWMGWMNPNSGNTGYAQKFQGRVTMTRDTSTSTVYMELSSLRSEDTAVYYCARARTWLLSPFDYWGQGTLVTVSSGGGGSGGGGSGGGGSEIVMTQSPATLSVSPGERATLSCRASQSVGRYLAWYQQKPGQAPRLLIYGASTRATGIPARFSGSGSGTEFTLTISSLQSEDFAVYYCQHYDSSPMYTFGQGTKLEIK

SEQ ID NO: 534 - protein, 241 aa, synthetic construct
QVQLVQSGAEVKKPGSSVKVSCKASGYTFRGSGISWVRQAPGQGLEWMGIIYPADSETRYSPSFQGRVTITADESTSTAYMELSSLRSEDTAVYYCARESSSWDYFDYWGQGTLVTVSSGGGGSGGGGSGGGGSEIVMTQSPATLSVSPGERATLSCRASQSVRSYLAWYQQKPGQAPRLLIYGASTRATGIPARFSGSGSGTEFTLTISSLQSEDFAVYYCQQHGSLPLTFGQGTKVEIK

SEQ ID NO: 535 - protein, 238 aa, synthetic construct
QVQLVQSGAEVKKPGSSVKVSCKASGGTFSSYAISWVRQAPGQGLEWMGRINPSGGSTSYAQKFQGRVTMTRDTSTSTVYMELSSLRSEDTAVYYCARGRYSSSSWGQGTLVTVSSGGGGSGGGGSGGGGSDIQMTQSPSSLSASVGDRVTITCRASQSISTYLNWYQQKPGKAPKLLIYAASSLQRGVPSRFSGSGSGTDFTLTISSLQPEDFATYYCQQSYTTPLTFGGGTKVEIK

SEQ ID NO: 536 - protein, 242 aa, synthetic construct
QVQLVQSGAEVKKPGASVKVSCKASGYTFSNYYMHWVRQAPGQGLEWVGWMNPKSGNTGYAQKFQGRVTMTRDTSTSTVYMELSSLRSEDTAVYYCARGRTWIQSSLGYWGQGTLVTVSSGGGGSGGGGSGGGGSDIQMTQSPSSLSASVGDRVTITCRASQYISRWLAWYQQKPGKAPKLLIYGSSTLQSGVPSRFSGSGSGTDFTLTISSLQPEDFATYYCQQYYSTPFTFGPGTKLEIK

SEQ ID NO: 537 - protein, 243 aa, synthetic construct
QVQLVQSGAEVKKPGASVKVSCKASGYTFTGYYIHWVRQAPGQGLEWMGWMNPHSGNTGYAQKFQGRVTMTRDTSTSTVYMELSSLRSEDTAVYYCAREGGRYSSGRLGYWGQGTLVTVSSGGGGSGGGGSGGGGSDIQMTQSPSSLSASVGDRVTITCRASQGISSWLAWYQQKPGKAPKLLIYAASTLQTGVPSRFSGSGSGTDFTLTISSLQPEDFATYYCQQSKSIPITFGGGTKVEIK

SEQ ID NO: 538 - protein, 247 aa, synthetic construct
QVQLVQSGAEVKKPGASVKVSCKASGYTFTGYYMHWVRQAPGQGLEWMGKISAHSGETKYAQNVQGRVTMTRDTSTSTVYMELSSLRSEDTAVYYCARANYYGDYVNYYYGMDVWGQGTTVTVSSGGGGSGGGGSGGGGSDIQMTQSPSSLSASVGDRVTITCQASQDISNYLNWYQQKPGKAPKLLIYKASSLESGVPSRFSGSGSGTDFTLTISSLQPEDFATYYCQQTYTIPITFGQGTRLEIK

SEQ ID NO: 539 - protein, 241 aa, synthetic construct
EVQLLESGGGLVQPGGSLRLSCAASGFTFSSRAMSWVRQAPGKGLEWVSRINYDGSATTYADSVKGRFTISRDNSKNTLYLQMNSLRAEDTAVYYCARGITIFGVFDYWGQGTLVTVSSGGGGSGGGGSGGGGSDIQMTQSPSSLSASVGDRVTITCRASQSISTWLAWYQQKPGKAPKLLIYRASNLQSGVPSRFSGSGSGTDFTLTISSLQPEDFATYYCQQSYSTPLTFGGGTKVEIK

SEQ ID NO: 540 - protein, 243 aa, synthetic construct
EVQLLESGGGLVQPGGSLRLSCAASGFTFSSYAMHWVRQAPGKGLEWVSYISSSGSTVYYADSVKGRFTISRDNSKNTLYLQMNSLRAEDTAVYYCARVSNVTPRSGFGYWGQGTLVTVSSGGGGSGGGGSGGGGSDIQMTQSPSSLSASVGDRVTITCRASQSISRYLNWYQQKPGKAPKLLIYSASTLQSGVPSRFSGSGSGTDFTLTISSLQPEDFATYYCQQAHSFPPSFGQGTKLEIK

SEQ ID NO: 541 - protein, 243 aa, synthetic construct
QVQLAQSGAEVKKPGASVKVSCKASGYTFTRHYIQWVRQAPGQGLEWMGWINPNSGNTGYAQKFQGRVTMTRDTSTSTVYMELSSLRSEDTAVYYCARGRQWLRGEYFQHWGQGTLVTVSSGGGGSGGGGSGGGGSDIQMTQSPSSLSASVGDRVTITCQASQDISRYLNWYQQKPGKAPKLLIYGASNLLSGVPSRFSGSGSGTDFTLTISSLQPEDFATYYCQQTHTTPYTFGQGTRLEIK

SEQ ID NO: 542 - protein, 240 aa, synthetic construct
QVQLVQSGAEVKKPGASVKVSCKASGGSFSGYAVSWVRQAPGQGLEWLGVINPSDSWTAFAQKFQGRVTMTRDTSTSTVYMELSSLRSEDTAVYYCAREREDDAFDIWGQGTTVTVSSGGGGSGGGGSGGGGSDIQMTQSPSSLSASVGDRVTITCRASQGIRNWLAWYQQKPGKAPKLLIYRASTLQSGVPSRFSGSGSGTDFTLTISSLQPEDFATYYCQQSYTTPFTFGQGTKLEIK

SEQ ID NO: 543 - protein, 243 aa, synthetic construct
QVQLVQSGAEVKKPGASVKVSCKASGGTFSSYAISWVRQAPGQGLEWMGIINPRGGSTNYAQKFQGRVTMTRDTSTSTVYMELSSLRSEDTAVYYCAREGSSWYYDAFDIWGQGTMVTVSSGGGGSGGGGSGGGGSDIQMTQSPSSLSASVGDRVTITCRASQSISSYLNWYQQKPGKAPKLLIYAAYNLQSGVPSRFSGSGSGTDFTLTISSLQPEDFATYYCQQSYSIPFTFGGGTKVEIK

SEQ ID NO: 544 - protein, 243 aa, synthetic construct
QVQLVQSGAEVKKPGASVKVSCKASGGTFSSYAISWVRQAPGQGLEWMGWMNPNSGDTHYAQKFQGRVTMTRDTSTSTVYMELSSLRSEDTAVYYCAREGSSWYYDAFDIWGQGTLVTVSSGGGGSGGGGSGGGGSDIQMTQSPSSLSASVGDRVTITCRASQSISRWLAWYQQKPGKAPKLLIYAASTLQTGVPSRFSGSGSGTDFTLTISSLQPEDFATYYCLQHSSYPFTFGQGTKVEIK

SEQ ID NO: 545 - protein, 238 aa, synthetic construct
QVQLVQSGAEVKKPGASVKVSCKASGYSFTSHYMHWVRQAPGQGLEWMGWMNPNSGNTGYAQKFQGRVTMTRDTSTSTVYMELSSLRSEDTAVYYCARLGQQLDYWGQGTLVTVSSGGGGSGGGGSGGGGSDIQMTQSPSSLSASVGDRVTITCRASQSIRNYLNWYQQKPGKAPKLLIYEASRLQSGVPSRFSGSGSGTDFTLTISSLQPEDFATYYCQQSYSAPPTFGPGTKVDIK

SEQ ID NO: 546 - protein, 244 aa, synthetic construct
QVQLVQSGAEVKKPGASVKVSCKASGYTFIGYYMHWVRQAPGQGLEWMGRINPNSGETNYAQKFQGRVTMTRDTSTSTVYMELSSLRSEDTAVYYCARVRVRGVIHPGFDPWGQGTLVTVSSGGGGSGGGGSGGGGSDIQMTQSPSSLSASVGDRVTITCQASQDISNYLNWYQQKPGKAPKLLIYAASSLQSGVPSRFSGSGSGTDFTLTISSLQPEDFATYYCQQSYSTPVTFGPGTKVDIK

SEQ ID NO: 547 - protein, 243 aa, synthetic construct
QVQLVQSGAEVKKPGASVKVSCKASGYTFRNYYIHWVRQAPGQGLEWMGRINPNSGGTNYAQKFQGRVTMTRDTSTSTVYMELSSLRSEDTAVYYCARARIAVAVSGFGYWGQGTLVTVSSGGGGSGGGGSGGGGSDIQMTQSPSSLSASVGDRVTITCQASQDISNYLNWYQQKPGKAPKLLIYAASSLHSGVPSRFSGSGSGTDFTLTISSLQPEDFATYYCQESSSFPYTFGPGTKVDIK

SEQ ID NO: 548 - protein, 240 aa, synthetic construct
QVQLVQSGAEVKKPGASVKVSCKASGYTFSRWYMHWVRQAPGQGLEWMGRINPNSGGTNYAQKFQGRVTMTRDTSTSTVYMELSSLRSEDTAVYYCARVGGYGWFDPWGQGTLVTVSSGGGGSGGGGSGGGGSDIQMTQSPSSLSASVGDRVTITCQATQDIRNYLNWYQQKPGKAPKLLIYATSSLQSGVPSRFSGSGSGTDFTLTISSLQPEDFATYYCQQSYSPPYTFGQGTKLEIK

SEQ ID NO: 549 - protein, 243 aa, synthetic construct
QVQLVQSGAEVKKPGASVKVSCKASGYTFSRYFMHWVRQAPGQGLEWMGWINPNSGGTNYAQKFQGRVTMTRDTSTSTVYMELSSLRSEDTAVYYCARVRIGWLQSPPLYWGQGTLVTVSSGGGGSGGGGSGGGGSDIQMTQSPSSLSASVGDRVTITCRASQSISTWLAWYQQKPGKAPKLLIYAASSLQSGVPSRFSGSGSGTDFTLTISSLQPEDFATYYCQQSYGFPWTFGQGTKVEIK

SEQ ID NO: 550 - protein, 242 aa, synthetic construct
QVQLVQSGAEVKKPGASVKVSCKASGYTFTGYFMHWVRQAPGQGLEWMGWMNPNSGNTGYAQKFQGRVTMTRDTSTSTVYMELSSLRSEDTAVYYCVRGRTWIQSSLGYWGQGTLVTVSSGGGGSGGGGSGGGGSDIQMTQSPSSLSASVGDRVTITCRASQSISSYLNWYQQKPGKAPKLLIYAASSLQSGVPSRFSGSGSGTDFTLTISSLQPEDFATYYCQQSYSTPLTFGGGTKVEIK

SEQ ID NO: 551 - protein, 248 aa, synthetic construct
QVQLVQSGAEVKKPGASVKVSCKASGYTFTGYYLHWVRQAPGQGLEWMGWISAYNGNTNYAQNLQGRVTMTRDTSTSTVYMELSSLRSEDTAVYYCARHSYSGSYSTLPYYGMDVWGQGTTVTVSSGGGGSGGGGSGGGGSDIQMTQSPSSLSASVGDRVTITCRASQGISNYLAWYQQKPGKAPKLLIYTASTLFPGVPSRFSGSGSGTDFTLTISSLQPEDFATYYCQQSYSIPLTFGGGTKVEIK

SEQ ID NO: 552 - protein, 243 aa, synthetic construct
QVQLVQSGAEVKKPGASVKVSCKASGYTFTGYYMHWVRQAPGQGLEWMGRINPNSGGTNYAQKFQGRVTMTRDTSTSTVYMELSSLRSEDTAVYYCARERAGYSSGQFDYWGQGTLVTVSSGGGGSGGGGSGGGGSDIQMTQSPSSLSASVGDRVTITCRASQSISNWLAWYQQKPGKAPKLLIYAASTLQNGVPSRFSGSGSGTDFTLTISSLQPEDFATYYCQQSYTFPITFGQGTKVEIK

SEQ ID NO: 553 - protein, 243 aa, synthetic construct
QVQLVQSGAEVKKPGASVKVSCKASGYTFTGYYMHWVRQAPGQGLEWMGWINPNSGGTHYAQKFQGRVTMTRDTSTSTVYMELSSLRSEDTAVYYCARVRIGWLQSPPLYWGQGTLVTVSSGGGGSGGGGSGGGGSDIQMTQSPSSLSASVGDRVTITCRASQGISNYLAWYQQKPGKAPKLLIYATSRLQSGVPSRFSGSGSGTDFTLTISSLQPEDFATYYCQQSYKTPLTFGGGTKVEIK

SEQ ID NO: 554 - protein, 243 aa, synthetic construct
QVQLVQSGAEVKKPGASVKVSCKASGYTFTNYYMHWVRQAPGQGLEWMGWINPKSGGTSYAQKFQGRVTMTRDTSTSTVYMELSSLRSEDTAVYYCASGKQWLVGGRFDYWGQGTLVTVSSGGGGSGGGGSGGGGSDIQMTQSPSSLSASVGDRVTITCRASQSISSYLNWYQQKPGKAPKLLIYAASSLQSGVPSRFSGSGSGTDFTLTISSLQPEDFATYYCQQSYSTPLTFGGGTKVEIK

SEQ ID NO: 555 - protein, 241 aa, synthetic construct
QVQLVQSGAEVKKPGASVKVSCKASGYTFTRYYIHWVRQAPGQGLEWMGWMNPNSGNTGFAQKLQGRVTMTRDTSTSTVYMELSSLRSEDTAVYYCARGPFPRGRLDLWGQGTLVTVSSGGGGSGGGGSGGGGSDIQMTQSPSSLSASVGDRVTITCRASQGISRWLGWYQQKPGKAPKLLIYGASNLQTGVPSRFSGSGSGTDFTLTISSLQPEDFATYYCQQSYSSPRTFGQGTKVEIK

SEQ ID NO: 556 - protein, 241 aa, synthetic construct
QVQLVQSGAEVKKPGASVKVSCKASGYTFTRYYMHWVRQAPGQGLEWMGIINPTGGSTSYAQKFQGRVTMTRDTSTSTVYMELSSLRSEDTAVYYCARGRTWIQSSLGYWGQGTLVTVSSGGGGSGGGGSGGGGSDIQMTQSPSSLSASVGDRVTITCRASRSINRWLAWYQQKPGKAPKLLIYGASTLQSGVPSRFSGSGSGTDFTLTISSLQPEDFATYYCQQSYSTPTFGGGTKVEIK

SEQ ID NO: 557 - protein, 243 aa, synthetic construct
QVQLVQSGAEVKKPGASVKVSCKASGYTFTSYYMQWVRQAPGQGLEWMGWMNPNSGNTGYAQKFQGRVTMTRDTSTSTVYMELSSLRSEDTAVYYCARVRIGWLQSPPLYWGQGTLVTVSSGGGGSGGGGSGGGGSDIQMTQSPSSLSASVGDRVTITCRASQGISNYLAWYQQKPGKAPKLLIYAASSLQSGVPSRFSGSGSGTDFTLTISSLQPEDFATYYCQQSYSIPFTFGPGTKVDIK

SEQ ID NO: 558 - protein, 242 aa, synthetic construct
QVQLVQSGAEVKKPGASVKVSCKASGYTFTTYYMHWVRQAPGQGLEWMGIINPSGGSTSYAQKFQGRVTMTRDTSTSTVYMELSSLRSEDTAVYYCARGRSWYRSNVDYWGQGTLVTVSSGGGGSGGGGSGGGGSDIQMTQSPSSLSASVGDRVTITCRASQSISSWLAWYQQKPGKAPKLLIYAASSLQSGVPSRFSGSGSGTDFTLTISSLQPEDFATYYCQQSYSTPRTFGQGTRLEIK

SEQ ID NO: 559 - protein, 252 aa, synthetic construct
QVQLVQSGAEVKKPGASVKVSCKASGHTFTRYYMHWVRQAPGQGLEWMGWINPNSGNTGDAQKFQGRVTMTRDTSTSTVYMELSSLRSEDTAVYYCARDRGIVVVPAAIGGMDVWGQGTMVTVSSGGGGSGGGGSGGGGSDIVMTQSPLSLPVTPGEPASISCRSSQSLLHSNGYNYLDWYLQKPGQSPQLLIYLGSNRASGVPDRFSGSGSGTDFTLKISRVEAEDVGVYYCMQALQTPITFGQGTRLEIK

SEQ ID NO: 560 - protein, 244 aa, synthetic construct
QVQLVQSGAEVKKPGASVKVSCKASGYTFTGYFMHWVRQAPGQGLEWMGRINPNSGGTNYAQKFQGRVTMTRDTSTSTVYMELSSLRSEDTAVYYCARGKGRYFDLWGRGTLVTVSSGGGGSGGGGSGGGGSDIVMTQSPLSLPVTPGEPASISCRSSQSLLHSNGYNYLDWYLQKPGQSPQLLIYLGSNRASGVPDRFSGSGSGTDFTLKISRVEAEDVGVYYCMQGTHWPITFGQGTRLEIK

SEQ ID NO: 561 - protein, 249 aa, synthetic construct
QVQLVQSGAEVKKPGASVKVSCKASGYTFTRYYLHWVRQAPGQGLEWMGWVSAYNGNTNYAQKFQGRVTMTRDTSTSTVYMELSSLRSEDTAVYYCARGYCSGGSCYWFDPWGQGTLVTVSSGGGGSGGGGSGGGGSDIVMTQSPLSLPVTPGEPASISCRSSQSLLHSNGYNYLDWYLQKPGQSPQLLIYLGSNRASGVPDRFSGSGSGTDFTLKISRVEAEDVGVYYCMQALQTPLTFGQGTKVEIK

SEQ ID NO: 562 - protein, 241 aa, synthetic construct
QVQLVQSGAEVKKPGASVKVSCKASGGTFSSYTLSWVRQAPGQGLEWMGWIHPKSGVTKNAQKFQGRVTMTRDTSTSTVYMELSSLRSEDTAVYYCARGWVYGRMDAWGQGTTVTVSSGGGGSGGGGSGGGGSEIVMTQSPATLSVSPGERATLSCRASQSVSSNYLAWYQQKPGQAPRLLIYGASTRATGIPARFSGSGSGTEFTLTISSLQSEDFAVYYCQQYGTLPYTFGQGTKVEIK

SEQ ID NO: 563 - protein, 245 aa, synthetic construct
QVQLVQSGAEVKKPGASVKVSCKASGYSFTTYYIHWVRQAPGQGLEWMGIINPSGGSTSYAQKFQGRVTMTRDTSTSTVYMELSSLRSEDTAVYYCARGGYYGSGYNSVGYWGPGTLVTVSSGGGGSGGGGSGGGGSEIVMTQSPATLSVSPGERATLSCRASQSVSSNTLAWYQQKPGQAPRLLIYGASTRATGIPARFSGSGSGTEFTLTISSLQSEDFAVYYCQQYGSSPLTFGPGTKVDIK

SEQ ID NO: 564 - protein, 241 aa, synthetic construct
QVQLVQSGAEVKKPGASVKVSCKASGYTFTNYYMHWVRQAPGQGLEWMGWMNPNSGNTGYAQNLQGRVTMTRDTSTSTVYMELSSLRSEDTAVYYCARGRTWFRSGMDVWGQGTTVTVSSGGGGSGGGGSGGGGSEIVMTQSPATLSVSPGERATLSCRASQSVSSYLAWYQQKPGQAPRLLIYGASTRATGIPARFSGSGSGTEFTLTISSLQSEDFAVYYCQQYDISVTFGPGTKVDIK

SEQ ID NO: 565 - protein, 245 aa, synthetic construct
QVQLVQSGAEVKKPGASVKVSCKASGYTFTDYYIHWVRQAPGQGLEWMGWISTYNGNTNYAQKLQGRVTMTRDTSTSTVYMELSSLRSEDTAVYYCARGMVRGMDVWGQGTMVTVSSGGGGSGGGGSGGGGSDIVMTQSPDSLAVSLGERATINCKSSQSVLYSSNNKNYLAWYQQKPGQPPKLLIYWASTRESGVPDRFSGSGSGTDFTLTISSLQAEDVAVYYCQQYYTTPWTFGQGTRLEIK

SEQ ID NO: 566 - protein, 246 aa, synthetic construct
QVQLVQSGAEVKKPGASVKVSCKASGYTFTGYRMHWVRQAPGQGLEWMGVINPNTGTARFAQKFQGRVTMTRDTSTSTVYMELSSLRSEDTAVYYCASVGVYWYFDLWGRGTLVTVSSGGGGSGGGGSGGGGSDIVMTQSPDSLAVSLGERATINCKSSQSVLYSSNNKNYLAWYQQKPGQPPKLLIYWASTRESGVPDRFSGSGSGTDFTLTISSLQAEDVAVYYCQQYYSAPLTFGGGTKVEIK

SEQ ID NO: 567 - protein, 249 aa, synthetic construct
QVQLVQSGAEVKKPGASVKVSCKASGYTFTGYYMHWVRQAPGQGLEWMGMINPSGGGTTYAQKFQGRVTMTRDTSTSTVYMELSSLRSEDTAVYYCARDRRSMITFRTDYWGQGTLVTVSSGGGGSGGGGSGGGGSDIVMTQSPDSLAVSLGERATINCKSSQSVLYSSNNKNYLAWYQQKPGQPPKLLIYWASTRESGVPDRFSGSGSGTDFTLTISSLQAEDVAVYYCQQYYSTPYTFGQGTKLEIK

SEQ ID NO: 568 - protein, 251 aa, synthetic construct
QVQLVQSGAEVKKPGASVKVSCKASGYTFTGYYMHWVRQAPGQGLEWMGWMNPNSGNTGYAQKFQGRVTMTRDTSTSTVYMELSSLRSEDTAVYYCAGRKWLGLDFYNWFDPWGQGTLVTVSSGGGGSGGGGSGGGGSDIVMTQSPDSLAVSLGERATINCKSSQSVLYSSNNKNYLAWYQQKPGQPPKLLIYWASTRQSGVPDRFSGSGSGTDFTLTISSLQAEDVAVYYCQQYYSTPWTFGQGTKVEIK

SEQ ID NO: 569 - protein, 239 aa, synthetic construct
QVQLVQSGAEVKKPGSSVKVSCKASGGTFSSYAISWVRQAPGQGLEWVGGIMPIFGTANYAQKFQGRVTITADESPSTAYMELSSLRSEDTAVYYCATGRRELLNWGQGTLVTVSSGGGGSGGGGSGGGGSEIVMTQSPATLSVSPGERATLSCRASQSVNSRFLAWYQQKPGQAPRLLIYGASTRATGIPARFSGSGSGTEFTLTISSLQSEDFAVYYCMQGTHWPYTFGQGTKVEIK

SEQ ID NO: 570 - protein, 245 aa, synthetic construct
QVQLVQSGAEVKKPGSSVKVSCKASGYTFTSYDINWVRQAPGQGLEWMGGIIPIFGTANYAQKFQGRVTITADESTSTAYMELSSLRSEDTAVYYCATTPGDAFDIWGQGTMVTVSSGGGGSGGGGSGGGGSDIVMTQSPDSLAVSLGERATINCKSSQSVLYSSNNKNYLAWYQQKPGQPPKLLIYWASTRESGVPDRFSGSGSGTDFTLTISSLQAEDVAVYYCQQYSDTPLTFGQGTKVEIK

SEQ ID NO: 571 - protein, 238 aa, synthetic construct
EVQLLESGGGLVKPGGSLRLSCAASGFTFSSSWMHWVRQAPGKGLEWVSAIGTAGDTYYPGSVKGRFTISRDDSKNTLYLQMNSLKTEDTAVYYCARVRLGHFDLWGRGTLVTVSSGGGGSGGGGSGGGGSDIQMTQSPSSLSASVGDRVTITCRASQSISRYLNWYQQKPGKAPKLLIYAASSLQSGVPSRFSGSGSGTDFTLTISSLQPEDFATYYCQQSYSNPPTFGQGTKLEIK

SEQ ID NO: 572 - protein, 241 aa, synthetic construct
EVQLLESGGGLVQHGGSLRLSCAASGFAFSSYVLHWVRQAPGKGLEWVSSISSSSSYIYYADSVKGRFTISRDNSKNTLYLQMNSLRAEDTAVYYCARGDRYPGLPNYWGQGTLVTVSSGGGGSGGGGSGGGGSDIQMTQSPSSLSASVGDRVTITCRASQGISSWLAWYQQKPGKAPKLLIYQASNKDTGVPSRFSGSGSGTDFTLTISSLQPEDFATYYCQQSYRIPWTFGQGTKVEIK

SEQ ID NO: 573 - protein, 242 aa, synthetic construct
EVQLLESGGGLVQPGGSLRLSCAASGFAFSGTWMQWVRQAPGKGLEWVSDISGSSRDTNYADSVKGRFTISRDNSKNTLYLQMNSLRAEDTAVYYCAKDHWDSYGYLDYWGQGTLVTVSSGGGGSGGGGSGGGGSDIQMTQSPSSLSASVGDRVTITCRASQSISGWLAWYQQKPGKAPKLLIYAASTLRDGVPSRFSGSGSGTDFTLTISSLQPEDFATYYCQQANSFPLTFGQGTKVEIK

SEQ ID NO: 574 - protein, 240 aa, synthetic construct
EVQLLESGGGLVQPGGSLRLSCAASGFMFDYYAMHWVRQAPGKGLEWVSLISYDGRNKYYADSVKGRFTISRDNSKNTLYLQMNSLRAEDTAVYYCARPGSYSRFQHWGQGTLVTVSSGGGGSGGGGSGGGGSDIQMTQSPSSLSASVGDRVTITCRASQGISNNLNWYQQKPGKAPKLLIYAASSLQSGVPSRFSGSGSGTDFTLTISSLQPEDFATYYCQQANNFPITFGQGTKVEIK

SEQ ID NO: 575 - protein, 243 aa, synthetic construct
EVQLLESGGGLVQPGGSLRLSCAASGFTFGAYVMHWVRQAPGKGLEWVSSISGGSTYYADSVKGRFTISRDNSKNTLYLQMNSLRAEDTAVYYCARHPVRGVIGAGWFDPWGQGTLVTVSSGGGGSGGGGSGGGGSDIQMTQSPSSLSASVGDRVTITCRASQNISRWLAWYQQKPGKAPKLLIYAASSLQSGVPSRFSGSGSGTDFTLTISSLQPEDFATYYCQQAISFPLTFGGGTKVEIK

SEQ ID NO: 576 - protein, 243 aa, synthetic construct
EVQLLESGGGLVQPGGSLRLSCAASGFTFSSYAMHWVRQAPGKGLEWLAVISFDGSIRHYADSVKGRFTISRDNSKNTLYLQMNSLRAEDTAVYYCAKPKASSGPRLIDYWGQGTLVTVSSGGGGSGGGGSGGGGSDIQMTQSPSSLSASVGDRVTITCRASQGISNSLAWYQQKPGKAPKLLIYSAVNLQSGVPSRFSGSGSGTDFTLTISSLQPEDFATYYCQQANSFPLTFGGGTKVEIK

SEQ ID NO: 577 - protein, 245 aa, synthetic construct
EVQLLESGGGLVQPGGSLRLSCAASGFTFSSYAMHWVRQAPGKGLEWVSSISSSSTYIHYADSVKGRFTISRDNSKNTLYLQMNSLRAEDTAVYYCARVGRYYGSGSSLVDYWGQGTLVTVSSGGGGSGGGGSGGGGSDIQMTQSPSSLSASVGDRVTITCRASQSVSSWLAWYQQKPGKAPKLLIYDASSLQSGVPSRFSGSGSGTDFTLTISSLQPEDFATYYCQQAKSFPPTFGQGTKVEIK

SEQ ID NO: 578 - protein, 248 aa, synthetic construct
EVQLLESGGGLVQPGGSLRLSCAASGFTFSSYAMSWVRQAPGKGLEWVSSISSASSYKYYADSVKGRFTISRDNSKNTLYLQMNSLRAEDTAVYYCARDIYSSGWRGYYYYGMDVWGQGTTVTVSSGGGGSGGGGSGGGGSDIQMTQSPSSLSASVGDRVTITCRASQGIRNDLNWYQQKPGKAPKLLIYAATRLQSGVPSRFSGSGSGTDFTLTISSLQPEDFATYYCQQAHSFPYSFGQGTRLEIK

SEQ ID NO: 579 - protein, 250 aa, synthetic construct
EVQLLESGGGLVQPGGSLRLSCAASGFTFSSYAMSWVRQAPGKGLEWVSAISGSGGNAYYADSVKGRFTISRDNAKNSLYLQMNSLRAEDTAVYYCAKNSWGSYRPRAFDIWGQGTMVTVSSGGGGSGGGGSGGGGSDIVMTQSPDSLAVSLGERATINCKSSQSVLYSSNNKNYLAWYQQKPGQPPKLLIYWASTRASGVPDRFSGSGSGTDFTLTISSLQAEDVAVYYCQQYLSLPYTFGQGTKVEIK

SEQ ID NO: 580 - protein, 249 aa, synthetic construct
QVQLVQSGAEVKKPGASVKVSCKASGNIFTAQYMHWVRQAPGQGLEWMGWMNPNTVYTGSAQKFQGRVTMTRDTSTSTVYMELSSLRSEDTAVYYCARDWVGDGYNSFDYWGQGTLVTVSSGGGGSGGGGSGGGGSDIVMTQSPDSLAVSLGERATINCKSSQSVLYSSNNKNYLAWYQQKPGQPPKLLIYWASTRESGVPDRFSGSGSGTDFTLTISSLQAEDVAVYYCQQYYTTPFTFGPGTKVDIK

SEQ ID NO: 581 - protein, 244 aa, synthetic construct
EVQLLESGGGLVQPGGSLRLSCAASGFTFSSYGMNWVRQAPGKGLEWVSAISGSGGRTYYADSVKGRFTISRDNAKNSLYLQMNSLRAEDTAVYYCAKGTYYSSPKYSFDYWGQGTLVTVSSGGGGSGGGGSGGGGSDIQMTQSPSSLSASVGDRVTITCRASQDIKNFLAWYQQKPGKAPKLLIYAASSLQSGVPSRFSGSGSGTDFTLTISSLQPEDFATYYCQQSYSTPWTFGQGTKLEIK

SEQ ID NO: 582 - protein, 253 aa, synthetic construct
EVQLLESGGGLVQPGGSLRLSCAASGLTFSSYQMSSVSQAPGKGLEWVSYISSAANTVYYADSVKGRFTISRDNSKNTLYLQMNSLRAEDTAVYYCAREDESRSPYCSGGSCYRAEYFQHWGQGTLVTVSSGGGGSGGGGSGGGGSDIQMTQSPSSLSASVGDRVTITCRASQGISNYLAWYQQKPGKAPKLLIYAASSLQSGVPSRFSGSGSGTDFTLTISSLQPEDFATYYCQQSYSTPLTFGPGTKVDIK

SEQ ID NO: 583 - DNA, 345 bp, synthetic construct
  source 1..345: mol_type = other DNA
caagtgcagctcgttcagtctggggcggaggttaaaaaaccgggctcatctgtgaaagtgtcttgcaaggcctccggctataccttcaccgattactacatgcattgggtccggcaggcacccgggcagggacttgagtggatgggcgggattatcccaatctttgggactgcaaattatgctcagaaattccaagggcgcgtaactattaccgccgacgaaagcacaagcaccgcgtacatggagctatcgagcctccgtagcgaggacaccgctgtgtactattgcgccaaggaaggcgctaatggctactggggtcagggaacattggtaacagtgtccagt

SEQ ID NO: 584 - DNA, 321 bp, synthetic construct
  source 1..321: mol_type = other DNA
gacattcagatgactcagtcgccaagttcactgtcagcttccgtcggcgatagagtcactattacttgtcaagcatcccaggatatatccaactatttgaactggtaccagcagaagcccggcaaggcacccaagctgctgatatacaaggcctcctctctggaatcaggcgtgcctagccgattttctgggtctgggagtggcacagatttcacgctgacaatcagctccttacagcctgaggacttcgccacctattattgtcaacaaagcagcaggatccctccaacctttgggcagggaacgaaagttgaaatcaag

SEQ ID NO: 585 - DNA, 381 bp, synthetic construct
  source 1..381: mol_type = other DNA
gaagtgcagctcctagagtctggcggcgggctggttcaacctggtgggtcattgcggctgagctgcgctgccagtgggttcaccttttcagattactacatgtcatgggtccggcaggctcccgggaagggccttgagtgggtgtcctacatctcaggttctggcgatgcaatctactatgctgactctgtaaagggccgcttcaccattagccgcgacaattcaaaaaatactctgtacctccagatgaacagccttcgagccgaagatactgccgtgtactattgtgcaagggataggtctgattgcggtggggacgacagattcctgtgtgacggttattttgacctgtggggaagaggcacgcttgtgtccttgtct

SEQ ID NO: 586 - DNA, 321 bp, synthetic construct
  source 1..321: mol_type = other DNA
gacatacagatgacacagagcccgagttccctgtccgctagtgttggggacagagtcaccattacatgcagggcctcgcagagcactaacaactatgtgaattggtatcagcaaaaacccggcaaagcaccaaaactgctgatatacgcggcctcctccctccaatctggtgtgccttctcgttttagcgggagtgggtcgggcactgatttcacgctcacaatcagttccttgcagcccgaggactttgccacctactattgtcaacagagctatagcattcctttaaccttcggaccagggacaaaggtcgatatcaag

SEQ ID NO: 587 - DNA, 381 bp, synthetic construct
  source 1..381: mol_type = other DNA
caggttcagctcgtccagtctggggcagaagtgaaaaaacctggaagcagcgtaaaagtctcctgcaaggcctccggatatacgttcacctcttatgacattaactgggtgcggcaggcacccggccagggccttgagtggatgggcgggattatcccaatttttgggaccacaaagtttgctcagaagtttcagggccgcgtgaccataaccgctgatgaaagtacaagcacagcttacatggagctctcgagtttgaggagcgaggatactgccgtgtactattgtgccagagattggtattcctcgagctggtataacggagatcgtggggattggttcgacccatggggtcagggaacacttgtaactgtgtcctcc

SEQ ID NO: 588 - DNA, 336 bp, synthetic construct
  source 1..336: mol_type = other DNA
gacatagttatgactcagtcaccactgtccctccctgtgactcctggcgagcccgcctcaatctcctgtaggagttcagggtccctgctgcattctaatggctacaattacctggactggtacctgcaaaagcccgggcaatcaccgcagctattgatctacgcggcaagtagcttacagagcggcgtgcctgaccgattctctgggtcagggagcggtactgatttcaccctgaagatctctagagttgaagccgaggacgtcggtgtctactattgcatgcaagggacccactggcccggcacgtttggccaagggacaaaagtggaaatcaag

SEQ ID NO: 589 - DNA, 360 bp, synthetic construct
  source 1..360: mol_type = other DNA
caagtgcagctcgtccagagtggtgccgaagtgaaaaaacctggggcatccgtaaaggtgtcctgcaaggcctcaggctattttttcactacatactacttacattgggttcggcaggctcccgggcagggcctggaatggatgggcgtcataaatccgaatagtcgcctgactagctacgcagaatcctttcagggaagggtcacaatgactagagataccagcacatctaccgtctatatggagctgagcagtctgcgtagcgaggacaccgctgtgtactattgtgagagagaaatgttcccatcgagctatgggattgatgtgtggggtcagggaaccacggtgacagtttcaagc

SEQ ID NO: 590 - DNA, 336 bp, synthetic construct
  source 1..336: mol_type = other DNA
gacattgttatgacacaatcaccattgagcctcccagtgactccaggcgagcccgcctccatctcgtgtcgaagttcccagtcccttctgcacagcaacggctataactacttagactggtacttgcagaagcccggccagagtcctcagctcctaatctacgcagcgagcacgctccagtcaggcgtgcccgataggttttctggcagcgggtctgggaccgatttcacgctgaagatttctcgggttgaagctgaggacgtgggcgtctactattgcatgcaagggacccactggcctcctaccttcggccaagggacaaaacttgagatcaag

SEQ ID NO: 591 - DNA, 363 bp, synthetic construct
  source 1..363: mol_type = other DNA
caagtgcaactggttcagtctggggcggaagtcaagaagccaggctctagcgtaaaagtctcgtgcaaagcctccgggtacacttttacgagctattacatgcattgggtgcggcaggctcccgggcagggcctggaatggatgggtcggatcattcctatcctgggcgccaccgattatgcacagaaattccaagggcgcgtaactataactgccgacgagagcacatcaaccgcctacatggagctcagctccctgcgatccgaggacaccgctgtgtactattgcgccagggctggctattcctccatcgccgcgcgcccggctttttggggtcagggaactcttgttaccgtgtctagt

SEQ ID NO: 592 - DNA, 324 bp, synthetic construct
  source 1..324: mol_type = other DNA
gagattgttatgacacagtcgccagcaaccctgagtgtcagcccgggcgagagggcaaccctcagttgtagagcttctcagagcgtgtcctccaacctagcatggtatcaacagaagcccggccaggcacccaggttgctcatctacggcgcctcaacaagagccaccgggattcctgcccgtttctctgggagcgggagcgggacagagtttacgcttacaataagtagtttacagtcagaagatttcgctgtgtactattgtcaacagtactactctcctttcccattgacttttggtggcggcacaaaggtggaaatcaag

SEQ ID NO: 593 - DNA, 378 bp, synthetic construct
  source 1..378: mol_type = other DNA
caagtgcagctcgtccagtctggagccgaagtgaaaaaacctggggcgtctgtaaaagtgtcctgcaaggcctccggctatactttcacgagctattacatgcattgggtgcggcaggcaccaggacaagggttggagtggctcgggataatcaacccatcagattacaccacaagctacgcgcagaagtttcagggccgcgtcaccatgaccagggatacttctacaagcaccgtctacatggaactctcgagtctaagaagtgaggatactgctgtgtattactgcgcccgagtggcctcttcatcctggtatccaggcgacgagaattggtattttgacctgtggggcagaggcacacttgtcaccgttagctca

SEQ ID NO: 594 - DNA, 339 bp, synthetic construct
  source 1..339: mol_type = other DNA
gacattgtcatgactcagtctcccgatagtcttgctgtgtccctgggagaaagggcaacaattaattgtaagtcctcccagtctgtgctgtactccagcaacaacaaaaattacttggcatggtatcagcaaaagcccggtcagccgcccaaactgctgatctactgggcttcaacccgggaaagcggcgtgcctgatcgtttcagcgggagcgggtctgggacagactttacactgaccatatccagcttacaggctgaggacgttgccatctactattgtcaacaatactatgccattccttggactttcgggcagggaacgaaggttgaaatcaag

SEQ ID NO: 595 - DNA, 354 bp, synthetic construct
  source 1..354: mol_type = other DNA
caggtccagcttgtccagtccggcgccgaagtcaaaaaacccggcgcgagtgtcaaagtgtcctgcaaggcctccggctatactttttcccggtacttcatgcattgggtgcggcaggcaccaggccaagggttggagtgggttggctggattaatcccaactccgggaataccggctatgcccaaaagtttcagggccgcgtaaccatgactcgagatacatctacatccactgtctacatggagctgtctagcctgcgcagcgaagacaccgcagtgtactattgcgctagggttgttaccggtggcagactggatgtgtggggacaaggcacaaccgtgacagtgtcaagc

SEQ ID NO: 596 - DNA, 324 bp, synthetic construct
  source 1..324: mol_type = other DNA
gaaattgtgatgactcagagtcctgctactctgagtgtgtctcctggtgagagggcaaccctcagttgtagagcttcgcagagagtatctaacaactatctcgcatggtatcagcaaaagcccgggcaggctcctaggctgcttatctacggcgcgtcaacccgggcctctggcattccggcccgtttttctgggagcggatcagggactgagttcacactaacaatatccagcttacagagcgaggacttcgccgtgtactattgtcaacagtacgggagcacaccatacaccttcggccaagggacgaaggttgaaatcaag

SEQ ID NO: 597 - DNA, 363 bp, synthetic construct
  source 1..363: mol_type = other DNA
caagtacagttggtccagagcggcgcagaagtcaagaagcctggggcgtcagtgaaagtgtcctgcaaagcctccgggtatcggttcacaagccagtacatgcattgggtccggcaggcgccaggccagggtttggagtggatggggataattaatcctagcggcggtagtacgagttacgcgcagaagttccagggccgcgttaccatgactcgtgacacctctaccagcaccgtctacatggaactctcctccctgaggagcgaggataccgccgtgtattactgtgctagaggcaggatcgctgtggcaggccacccactcggctactggggtcaagggactcttgtaacagtgtccagt

SEQ ID NO: 598 - DNA, 321 bp, synthetic construct
  source 1..321: mol_type = other DNA
gacattcagatgactcagtcgccctcttcactgtcagcttcggttggggatagagttactattacatgccgagcctctcagagtatctcctcctggctggcctggtatcagcaaaagccgggcaaagcacccaagctgctgatctacggagccagttccctacagagcggagtgccctctcgcttcagcgggagtggctctgggaccgacttcacacttacaataagcagtttacagcccgaagattttgcaacgtattattgtcaacaagctaactcatttccacctacctttggcggaggaacaaaagtggagatcaag

SEQ ID NO: 599 - DNA, 360 bp, synthetic construct
  source 1..360: mol_type = other DNA
caggtccaactggtccagtctggcgccgaagtgaaaaaacctggagcgtccgtgaaggtgtcctgcaaggcctccggctacaccttcacccgttattacatgcattgggttcgccaggcacccgggcaagggctggaatggatggggtggattaatccgaactccggcggtacaaattatgctcagaaatttcagggaagggtgacgatgactcgggatactagcacaagtacagtttacatggagctctcgagcctacgatcagaggacaccgccgtgtactattgtgctagaggcggctcatggggcagcgggccactcggctattggggacaagggacgcttgtcactgtatcctcc

SEQ ID NO: 600 - DNA, 321 bp, synthetic construct
  source 1..321: mol_type = other DNA
gacattcagatgacacagagtcccagttccttgtcggcttcagtcggtgatcgggtgactataacctgtcaggcctcccaggatatttctaggttcttgcattggtatcagcaaaagcctgggaaagcacccaagctgctgatctacggtgcaagcaacctgaaatctggggtgccatctagattcagcggcagcgggagcgggaccgactttacacttaccatctcaagtttacaaccagaggacttcgccacttattactgccagcagagctactctacacctcccacctttggcggtggcaccaaggttgaaatcaag

SEQ ID NO: 601 - DNA, 363 bp, synthetic construct
  source 1..363: mol_type = other DNA
caagtgcagcttgttcagtctggagccgaggttaaaaagcccggcgcgtccgttaaagtgtcctgcaaagcctctggctacaccttcacgagctactacatgcattgggtccggcaggcaccgggccaagggttggagtggatggggattattaatccatctggtgccgggaccacatatgggcacaactttcagggaagagtcacaatgactcgagacacctcgacaagcaccgtctacatggaactctctagcctgcgctcagaggacacggctgtgtactattgtgctcgcggccctagggataccgcaatggtgcggttcgattattggggtcagggaacacttgtaacagtgtccagt

SEQ ID NO: 602 - DNA, 321 bp, synthetic construct
  source 1..321: mol_type = other DNA
gaaattgtgatgactcagtctcctgctactctgagtgtatcacctggggaaagggcaactctgagttgtagagcctcgcagagcgtgtcctcctatctggcgtggtaccagcagaagcccgggcaggcaccaaggctattgatctacggagccagcactagagccaccgggatacccgcccgtttttctggcagcgggtcaggcactgagttcaccttaaccatctcctccctgcaaagtgaggacttcgctgtctattactgccagcaatatggtagcagcccaggcacgtttggccagggtacaaagctcgaaatcaag

SEQ ID NO: 603 - DNA, 348 bp, synthetic construct
  source 1..348: mol_type = other DNA
caggtccagcttgtccagtctggggcggaagttaaaaagcctggggctagtgtaaaggtgtcctgcaaggcctccggcggcacatttagcaattacgcaatcagttgggtgcggcaggctccaggtcaagggttggagtgggtgggccggattaatcccaactccggcggcactaattatgctcagaagtttcaagggcgcgttaccatgaccagggataccagcactagcaccgtctacatggaactaagctccctgaggtctgaggacactgctgtctactattgtgccagaggacgatactcctcttcgtcctggggtcagggaaccctcgtgaccgtatcatct

SEQ ID NO: 604 - DNA, 321 bp, synthetic construct
  source 1..321: mol_type = other DNA
gacattcagatgacacagagtccctcatcactgtcagcctccgttggtgatagagtgacaattacgtgccgtgcctctcagtccatcaacaactacttaaactggtatcagcaaaaaccgggcaaagcaccaaaactgctgatctacgcggcaagcagtctccagtctggcgtgcctagccgctttagcgggtctggtagcggcactgatttcacactgacaataagtagccttcagcccgaggacttcgccacctattactgtcaacagtcgtattccacaaaatggactttcgggcaagggacgaaagtggaaatcaag

SEQ ID NO: 605 - DNA, 360 bp, synthetic construct
  source 1..360: mol_type = other DNA
caggttcagcttgtccagtctggggcagaagtcaagaagcctggcgcctccgtgaaagtgtcgtgcaaggcctccggctataccttctcaaactactacatccactgggttcgacaggcgcccgggcagggcttggaatggatgggctggattaatccgaactccggtgatacaaattatgcacaaaaattccaagggcgggtaacaatgacccgggataccagtacatctacggtctacatggagctaagcagcctgcgcagtgaagataccgctgtgtactattgcgctagaggcatgacctggaggacctctgctgccacatactggggtcagggaacacttgttactgtgtcctcc

SEQ ID NO: 606 - DNA, 321 bp, synthetic construct
  source 1..321: mol_type = other DNA
gacattcagatgactcaaagcccaagctcactgtcagctagtgtgggcgatagagtgacgattacatgtagggcctcccaagggatctcgcgctggctcgcgtggtaccagcagaagcctgggaaggcacccaaactgctgatctacggcgccagcaacctccagactggggtgccctctcgtttttctggatctggtagcggcactgacttcaccctgacaatatccagcttacagcccgaggactttgccacctattattgtcaacagagttatagcactcctccaacttttgggccagggacgaaagtcgacatcaag

SEQ ID NO: 607 - DNA, 363 bp, synthetic construct
  source 1..363: mol_type = other DNA
caggttcagttggttcagtctggggcagaagttaaaaagccaggcgcgagcgtgaaagtgtcttgtaaggcctccggctataccttcaccaattactacatgcattgggtccggcaggctcctgggcaagggttggagtggatgggttggataagcgcctacaacggcaacaccaattacgctcagaaactgcaagggcgcgtgacgatgacaagagacacttcaacttcaaccgtctatatggaactgagtagcctccgatctgaggacaccgccgtgtactattgtgcaacagccagcggttggggacacagtaactccgcgggctactggggtcaagggactcttgtgacagtctcttca

SEQ ID NO: 608 - DNA, 324 bp, synthetic construct
  source 1..324: mol_type = other DNA
gagattgtcatgacacagtctcccgctactctgagtgtgtcgcccggcgaaagggcaaccctgagttgcagagcatcccagtcggtgaacgggaattatctcgcctggtatcagcaaaaaccgggccaggctcccaggctgttaatctacggagtctcctcccgggccagcgggattcctgctcgtttcagcggctccggatcaggcactgagttcacactaaccataagtagccttcagtctgaagattttgccgtgtactattgtcaacagtatggaagctctccatacacgtttgggcagggaacaaaggttgagatcaag

SEQ ID NO: 609 - DNA, 363 bp, synthetic construct
  source 1..363: mol_type = other DNA
gaagtccaactgctcgagagcggcggtgggctggttcagccaggcggtagtctccggctgtcctgtgctgcgagtgggttcaccttttccaatcactatatgagctgggtgcggcaggctccgggaaaaggcctggagtgggtatcagccatctccgggtctggcggcagcacttattacgccgatagcgttaagggtcgcttcaccattagccgggacaactccaagaacacactgtacttgcagatgaactcattacgcgctggggataccgccgtgtactattgcgcgagggaccgatacagatggggcagaggctattttcagcattggggacaagggactctagtaacagtgtcctcg

SEQ ID NO: 610 - DNA, 321 bp, synthetic construct
  source 1..321: mol_type = other DNA
gacatccaaatgacacagtcaccttcatccttgtccgcctctgtcggcgatagagtgacgattacatgtagggcaagtcagaggattagcacttatctgaattggtaccagcagaagcccggaaaagcacccaaactgctgatctactccgcatcgaccctccaggctggggtgccatctcgttttagcgggtctggctcaggcaccgatttcacgcttacaataagtagcctccagcccgaggactttgccacttattactgccaacaggcctactctcttccttggaccttcgggcagggaactaagttagaaatcaag

SEQ ID NO: 611 - DNA, 363 bp, synthetic construct
  source 1..363: mol_type = other DNA
caggttcagctggtccagtcgggcgccgaagtgaagaagcctggggcgagtgttaaagtgtcctgcaaggcctctggctacactttcactcgttattacatgcattgggttcggcaggcacctgggcaagggctggaatggatggggtggattaacccgaactccggagtgaccaattttgctcagaagttccaagggcgcgtaactatgacacgggacaccagtacatcaaccgtctacatggagctgtccagcctaaggagcgaagacactgctgtgtactattgtgcgagggtcagaattggctggctccagtcacctccactgtactggggacaaggaacgcttgtgacagtatccagc

SEQ ID NO: 612 - DNA, 321 bp, synthetic construct
  source 1..321: mol_type = other DNA
gacatacagatgacccagtcgccaagctccttgagtgcttccgtcggagatagagtgactataacctgccgagcctctcagtcaatcaatacctggctcgcctggtatcagcaaaagcccggcaaagctcccaaactgctgatctacgcagcaagcagtctccagagcggcgtgccctcacgcttttctgggtctgggagtggtacagatttcacccttacaattagcagcttgcagccagaggattttgccacgtattattgtcaacaggccatctcctttcccttaaccttcggcggcgggacaaaagtggagatcaag

SEQ ID NO: 613 - DNA, 357 bp, synthetic construct
  source 1..357: mol_type = other DNA
caggtccagctcgtacagtccggcgcggaggttaaaaagcctggtgcaagtgtaaaagtttcctgcaaggcctccggttacactttctcacggcactacatgcattgggtccggcaggcacccgggcagggcttggaatggatggggcgcattaatccgaactccggcggtactaattacgctcagaaatttcaagggcgagttaccatgacaagggatacctctacttccaccgtgtatatggaactgagtagccttaggagcgaggacaccgctgtgtactattgtgccagaagcatctacggcgattattggtttgatccttggggacaagggacacttgtcacagtgtctagt

SEQ ID NO: 614 - DNA, 321 bp, synthetic construct
  source 1..321: mol_type = other DNA
gacattcagatgacccagtctccatcatcactgtcagcttctgtgggcgatagagtgacaataacatgcagggcctcccagtcgatcaatcgctggctcgcgtggtatcaacagaagcccgggaaagcaccaaagctgctgatttacggcgccagcaacctacagagcggcgtgcctagtcgttttagcggttcagggtctggaaccgacttcacgttgacaataagcagtttacagcccgaggactttgccacctattattgtcaacaggctaactccttcccatacactttcgggcaaggcactaagctggaaatcaag

SEQ ID NO: 615 - DNA, 351 bp, synthetic construct
  source 1..351: mol_type = other DNA
caagtgcagcttgttcagtccggcgctgaagtgaaaaaacccggcgcatcagttaaagtgtcctgcaaggcctccggctatactttcacatcgtattacatccactgggtccggcaggctcctgggcagggactagagtggatggggtggatgagccctaatagcggcgataccggttacgcccaaaagtttcagggccgcgtaaccatgaccagggacacatctacatccaccgtctacatggagcttagctctttgcgatccgaagatacggctgtgtactattgcgcccggctcgtccgtggcgggtttgattactggggtcagggaacgctggtaacagtgtcaagt

SEQ ID NO: 616 - DNA, 321 bp, synthetic construct
  source 1..321: mol_type = other DNA
gacattcagatgacccagtctccaagcagcctgagtgcctcggttggggacagagtgactattacctgtcgcgctagtcagggaatctcctcctacctgaactggtatcaacagaagcccgggaaggcacccaaactcttgatttacgcggcgagtagactccaaagcggagtgccgagcaggttttccgggagcgggtctggcaccgatttcacactgacaataagtagtttacagccagaggacttcgcaacttactattgtcaacagtcttatagaagccctccaactttcgggcagggaactaagctggaaatcaag

SEQ ID NO: 617 - DNA, 366 bp, synthetic construct
  source 1..366: mol_type = other DNA
caggtccagctcgtacagagtggcgccgaagtcaagaagcctggagcttccgtcaaagtgtcctgcaaagccagcggctatactttcacgtcctcaggaattaattgggttcggcaggcacccgggcagggcttggagtggatggggtggattaatcccaactccggcggcgcaaaatatgcccaacgcttccagggacgggttactatgacccgagataccagcacctctactgtctacatggagctgagcagccttaggagtgaagataccgctgtgtactattgcgccagggcgagagggtattctggctcgaaaagagattttcagcattggggacaagggacattggttacagtctcatca

SEQ ID NO: 618 - DNA, 339 bp, synthetic construct
  source 1..339: mol_type = other DNA
gacattgtgatgacacagagtccggacagccttgctgtgtctctcggtgaacgcgcgaccatcaactgcaagtcctcccagtcggtgctgtactcaagcaacaacaagaattacctggcctggtatcaacagaaaccgggccagcctccaaagctgctgatctactgggctagtaccagggagtctggggtgcctgatcgtttctccggtagcggctccgggacagacttcaccctaactataagcagtttacaagcagaggacgtggccgtatatcactgtcaacagtactacaatacaccatttacgtttggaccagggacaaaagtggacatcaag

SEQ ID NO: 619 - DNA, 369 bp, synthetic construct
  source 1..369: mol_type = other DNA
caagtgcagttggttcagtctggagccgaagtgaagaagcctggggcgagcgtcaaagtgtcctgcaaggcctccggctacacttttaaccggaaattcatgcattgggttcggcaggcacccggtcaagggctggaatggatgggctggatgaacccgaacaacggtgcaactaattatgcacagaagttccagggccgcgtgacaatgacacgagataccagcacttcaaccgtctacatggagctctcttccctaaggagcgaagataccgccgtctactattgtgctagaggaagaggctattatggttctggttcatactatggggactattggggacaagggacccttgtaacagtctcctct

SEQ ID NO: 620 - DNA, 321 bp, synthetic construct
  source 1..321: mol_type = other DNA
gatattcagatgacccagtcgccaagttccttgtccgcttccgtaggcgaccgcgtgactataacttgcagggcctctcaaagtatctcgagatacctgaattggtaccagcagaagccagggaaagctccaaaactgctgatctacggagcgagcaatctccagagcggcgtgccgagtcgttttagcggcagcgggtctgggacagacttcacgctgacaataagtagcttacagcccgaggattttgctacgtattactgtcaacagagttactccacacctcccaccttcggccctgggacgaaagtggacatcaag

SEQ ID NO: 621 - DNA, 348 bp, synthetic construct
  source 1..348: mol_type = other DNA
caagtgcagctggtgcagagtggcgcggaggtcaaaaagcctggggcgtccgtgaaagtgtcctgcaaggcctccggatacaccttcacccgatattacatgcattgggttcggcaggcaccaggccaagggctcgaatggatggggtggatgaatcccaactccgggaatgcaggctatgctcagaaactgcaaggccgcgtgactatgactcgcgacacctccacctcaactgtctacatggagctaagtagcttgaggtctgaggacaccgctgtgtattactgtgccagaggctacaactggtttgatccatggggtcagggaacacttgtaacagtgtcaagt

SEQ ID NO: 622 - DNA, 321 bp, synthetic construct
  source 1..321: mol_type = other DNA
gacattcagatgacccagtcgccctcttcactgtccgcctcagttggggacagagtaaccattacctgtagggcctctcagaatatcgccacatacctgagctggtatcagcaaaagcctggcaaagctccaaagctgctgatctacggtgcaagcgccctccggtctggagtccctagccgtttttctgggtccgggagcgggacagatttcactctcacaatatctagcttacagccggaagatttcgctacttattactgccttcagcacaacacatatcccttgacatttggcggaggcacgaaggttgaaatcaag

SEQ ID NO: 623 - DNA, 351 bp, synthetic construct
  source 1..351: mol_type = other DNA
caggttcaactggtccagtcaggcgctgaagtgaagaagcctggcgcctctgtgaaagtgtcctgcaaagcctccggttatagtttctctggctactatctgcattgggttaggcaggcacctgggcagggcctggaatggatggggtggatgaatcccgattctgggaatactggctacgcgcaaaactttcagggacgggttacaatgacccgagatacttccacctcaaccgtctacatggaactctcctctctgcggagcgaggacaccgccgtgtactattgtgctcgcctgcaccgtggcgggcacgattactggggtcagggaacacttgtcactgtatcgagt

SEQ ID NO: 624 - DNA, 321 bp, synthetic construct
  source 1..321: mol_type = other DNA
gacattcagatgactcagagtccaagcagtttgagtgcttctgtgggcgacagagtaactattacatgcagggcctcccagtcaatctctcgctatctcaactggtatcagcaaaaacccggcaaggcaccgaagttactgatctacgcagcgagcacgctacagagcggagtgccatcaagatttagcggcagcgggtccgggaccgatttcacccttacgataagcagcttgcaacctgaggacttcgccacctactattgtcaacagtcttactccacacccgtgacatttgggcagggaacacggctcgagatcaag

SEQ ID NO: 625 - DNA, 363 bp, synthetic construct
  source 1..363: mol_type = other DNA
caggttcagctggtccagtctggcgccgaagttaaaaaacctggcgcgagcgtgaaagtgtcctgcaaggcctccggttacacattcacttcatattacatgcattgggtgcggcaggctcctgggcaagggttggagtggatggggcggattaatccgcactctggcgacgccgatttcgtcgataagtttcaagggcgcgtgactatgaccagggatactagcaccagcaccgtctacatggagctatcaagtttgcgctccgaagataccgcagtgtactattgcgccagggacagaagaggatatggcggcaatagccttgactattggggacaagggacacttgtaactgttagttct

SEQ ID NO: 626 - DNA, 321 bp, synthetic construct
  source 1..321: mol_type = other DNA
gacattcagatgactcagagtccaagttcactgtcagcttccgtgggtgacagagtgacgataacatgtagggccgggcagaacatcaagcgatacctcaactggtaccagcagaaacctgggaaggcacccaaactgctgatatatgcagcgagcagcctccagtctggggtaccctctcgtttcagcggctctgggtccggcaccgattttacgctcacaatcagttccctgcaaccagaggactttgctacatactattgtcaacagtcgtacagctcgcccttaaccttcggaggcggcaccaaagtcgaaatcaag

SEQ ID NO: 627 - DNA, 360 bp, synthetic construct
  source 1..360: mol_type = other DNA
caggttcagttggtacaatcaggagcagaagtgaaaaagcctggagcctcagtgaaggtgtcctgcaaagcctccggctatacattcacccggaattacctccattgggttcggcaggctcctggccagggcctggagtggatggggattattaatcccagtggcggcagcaccacttacgcccagaagttccaaggccgcgtaacaatgacccgagatacatcaacttccaccgtctacatggaactctccagcctgaggagcgaggacacggctgtgtactattgtgcccgcggcaggacatggttcagatcaggcatggatgtgtggggtcaagggaccaccgttacagtgtcctcc

SEQ ID NO: 628 - DNA, 324 bp, synthetic construct
  source 1..324: mol_type = other DNA
gaaatcgtgatgactcagagtcccgccacactgagtgtcagcccgggcgagcgggcaacactgagttgcagagcctcccagtctgtcggcaactatctagcttggtatcagcaaaagcctgggcaggctccaaggctgcttatttacggcgcgagcactagagcaactgggataccagcgcgtttttctgggtctgggtctgggactgagtttacccttaccatcagctcgttacagtctgaggacttcgcagtgtactattgtcaacagtaccactctagcccaccatatacgtttgggcagggtacgaaagtcgaaatcaag

SEQ ID NO: 629 - DNA, 360 bp, synthetic construct
  source 1..360: mol_type = other DNA
caagtgcagctggtccagtcaggcgcggaagtcaaaaaatctggcgcgagcgttaaggtgtcctgcaaggcctccggttacacctttacgtcctattacatgcattgggtccggcaggcacctgggcagggcctggagtggatgggcgttataaatccctctggcggcactacaagctacgcccagaagtttcaagggcgggtgacaatgactcgagagacaagcactagcaccgtctacatggaactcagctcgctgcgctcagaagataccgccgtgtattactgcgcaagaggaagagggtggctgaggtctgctctcggctattggggtcagggtacacttgtaaccgtgtcctcc

SEQ ID NO: 630 - DNA, 321 bp, synthetic construct
  source 1..321: mol_type = other DNA
gacattcagatgacccagtctccctcgtccttgtcagccagcgtgggtgatcgcgttaccattacctgtagggctagtcagagtatctcctcctggctcgcttggtatcagcaaaagcccggcaaagctcctaagctgctgatctacgcagcctcaactttgcagtccggcgtaccgagtcgtttttctgggagcgggagcgggaccgacttcacgctaactattagtagcttacagccagaggacttcgccacttattattgtcaacagtcatacaacacgccatacacattcgggcaaggcacaaaacttgagatcaag

SEQ ID NO: 631 - DNA, 375 bp, synthetic construct
  source 1..375: mol_type = other DNA
caggtccagttagtgcagtctggggcggaggtgaaaaagccaggagcgagcgtgaaagtgtcctgcaaagcctccggcgggcgattttcaacatacgccctgtcatgggttcggcaagcacccggccagggcctggagtggatggggtggattaacccgaactccggcggcacaaattacgcccagaaattccagggccgcgtaactatgactcgagacacctcaacttccaccgtctacatggagctaagctctctgaggagtgaagacacagcagtgtactattgcgccaagtccttgtggtggagtccaagccactactattactatgggatggatgtgtggggtcaaggcaccacagtcacagtttccagc

SEQ ID NO: 632 - DNA, 330 bp, synthetic construct
  source 1..330: mol_type = other DNA
gaaatcgtgatgacacagagccctgctaccctgagtgttagccctggggaaagggctaccctctcgtgtagagcctcacaatctgtctcctccaattatctcgcctggtatcaacagaagcccgggcaggctcccaggttgcttatctacgggatttcaactagagcatcgggtattcccgctagattttctggttctggcagcgggaccgagtttacccttacgataagtagcctccagagcgaggatttcgcagtgtactattgtcaacagcgctctaactggccacctagcataacgttcgggcagggaactcgtctggaaatcaag

SEQ ID NO: 633 - DNA, 354 bp, synthetic construct
  source 1..354: mol_type = other DNA
gaggttcaactgctcgagtctggcggcgggcttgttcagcccggcggttctttgaggttgtcatgtgccgcgtctgggtttaccttctcctcctatgccatgcattgggtgcggcaggctcctggcaagggcctggagtgggtggctgtcatctggtacgacgggagcagcaaatactacgccgattccgtgaaaggccgcttcaccatttctcgagacaactcaaagaatacgctgtacctccagatgaactccctgcgcgcagaagataccgctgtgtactattgcgcgcgtggggaagtgcggagagggttccagcactggggtcagggaacacttgtcacagtgtcctcc

SEQ ID NO: 634 - DNA, 321 bp, synthetic construct
  source 1..321: mol_type = other DNA
gacattcagatgacacagtctcctagttcactgtcagccagcgtcggtgatagagttacaataacttgtagggcctcgcagaatgtaggaagctggctcgcatggtatcaacagaagccagggaaagctcccaagctgctgatctacgcagcaagcagcctccagagcggcgtaccatcgaggttttccggcagcggaagtggcaccgacttcaccttaactattagatctctacagccggaagattttgccacctattactgccaacagagttattccactcccatcacgtttgggcaaggcactcggttagagatcaag

SEQ ID NO: 635 - DNA, 360 bp, synthetic construct
  source 1..360: mol_type = other DNA
caggttcagctggtccagtctggcgccgaagtgaagaagcccggcgcatccgtcaaagtgtcgtgcaaggcctccggatatacattttcccgctactacatgcattgggttcggcaggctcctggccaagggttggaatggatggggtggatgaatccgaactccggcgatactggttatgcacagaaattccaagggagggtaacaatgacccgcgacaccagcacatctacggtctacatggaactctcctcactgcgaagcgaggatactgccgtgtattactgcgctaagggaagggagtggctgagatctcctttcgactattggggtcaagggactcttgtgaccgttagcagc

SEQ ID NO: 636 - DNA, 321 bp, synthetic construct
  source 1..321: mol_type = other DNA
gacattcagatgacacagagcccttcttcactgtcagcttctgtgggcgatagagtgactattacctgtcgtgccagtcagtcaatcagcacttggctcgcttggtatcagcaaaagccagggaaagcgcccaaactgctgatctacgcagcgagtagtctccagtctggcgtgccctctcgcttttcgggctccgggtccggcaccgatttcacccttacaatttcaagcctacagccagaggactttgccacctattactgtcaacagttaagctcctacccattgacattcgggcaagggacaaaagtagagatcaag

SEQ ID NO: 637 - DNA, 357 bp, synthetic construct
  source 1..357: mol_type = other DNA
caggttcaactggtacagagcggcgccgaagtgaaaaaacccggcgcgagcgtgaaagtgtcctgcaaggcctccggctacaccttcactggatattacatgcattgggtccggcaggctcccgggcagggcctggagtggatgggatggatgaatccaaactccggaaataccggttacgcccagaaattccagggacgagttacaatgactcgtgatacatccactagcaccgtctacatggaactctcttctctacgctccgaggacaccgcagtgtactattgcgctaggctcagagcgaagggcggcggttttgactattggggtcagggtacacttgttactgtgtcaagt

SEQ ID NO: 638 - DNA, 321 bp, synthetic construct
  source 1..321: mol_type = other DNA
gacatccagatgacccagtcaccctcttcactgtcagccagcgtaggcgatagagtcactattacctgtagggcttcgcaagggattggaaactatttggcttggtatcaacagaagcccgggaaggcacctaaactgctgatctacgcagcaagcagcttagaaagcggagtgccgagtcgctttagcgggtccgggtctggcacagatttcacgcttacaataagtagtttgcagccagaggattttgccacgtactattgtcaacagggctaccggttcccacctacctttgggcctgggacaaaggtggacatcaag

SEQ ID NO: 639 - DNA, 369 bp, synthetic construct
  source 1..369: mol_type = other DNA
caggttcagctcgtacaatctggggcagaagtgaaaaagcccggcgccagcgttaaggtgtcctgcaaagccagcggctatacctttgcaaattacaacatccactgggtgcggcaagcacctgggcagggcctggagtggatggggtggatgaatccaaactccggcaataccggttacgctcagaaatttcaaggacgggtgaccatgaccagggacactagcacatcaactgtgtacatggagctaagcagtctgcgaagcgaagataccgctgtctactattgcgctcgcccacgatattcatctgggtggtatgggtggtattttgacctgtggggcagaggtacacttgtaacagtgtccagt

SEQ ID NO: 640 - DNA, 336 bp, synthetic construct
  source 1..336: mol_type = other DNA
gacattgtcatgacgcagagtccgttgtccctgcccgtgacacctggggaaccagcgtccatatcttgtagatcatcacagtccctcctccattcgaacggctacaactacttagattggtacttgcagaagcccgggcaatcgcctcagctcctgatctacttaggatctaatagggcctctggagtgccagatcgcttctcaggcagcgggagcggcacagatttcacgctgaaaattagtcgtgttgaggccgaagacgtaggcgtctactattgtatgcagagcacttattggcctccaactttcgggcagggaacaaagcttgagatcaag

SEQ ID NO: 641 - DNA, 360 bp, synthetic construct
  source 1..360: mol_type = other DNA
caggttcaactggtccagtcgggtgccgaggtgaaaaagcccggagcgtcagtgaaagtgtcctgcaaggcttctggctatacattcacgacttattacatgcattgggtgcggcaggcaccaggccaagggctagaatggatggggtggatgaatccgaactccggaaacacaggctacgcccagaagttccaagggcgggtaacaatgacccgagataccagcaccagcacggtctacatggagctctcctcactgcgctccgaagataccgcagtgtactattgtgcccgcgctaggacctggctgctgtctccatttgactattggggacaagggactcttgtgaccgttagtagc

SEQ ID NO: 642 - DNA, 324 bp, synthetic construct
  source 1..324: mol_type = other DNA
gaaattgttatgactcagagtcctgccaccctgagtgtaagtcctggggagagggcaactctgagttgtagagcctcccagtctgtgggcagatatttggcctggtaccagcagaagcctgggcaggctcccaggctcctcatctacggcgcgtccaccagagcaaccgggattccagctcgtttttcaggcagcggctctggcacagagttcacgttgactataagcagcttacagtctgaggacttcgccgtctattactgccagcactatgacagctcacccatgtacacttttgggcagggaacaaaacttgaaatcaag

SEQ ID NO: 643 - DNA, 357 bp, synthetic construct
  source 1..357: mol_type = other DNA
caggtccagctggtgcagtctggggcagaagtgaaaaaacccggaagcagcgtaaaggtgtcctgcaaggcctccggttacaccttccgcgggtctggcatctcctgggtccggcaagctcctgggcaagggttggagtggatggggattatctacccagctgacagcgagacacgctacagcccgagttttcagggccgagtgaccattaccgcggatgagtctacttcaactgcctatatggaactctctagtctccggtccgaggacactgcggtgtactattgtgcaagggagagttcctcctgggattatttcgattattggggacaaggaacacttgtaacagtgtcaagc

SEQ ID NO: 644 - DNA, 321 bp, synthetic construct
  source 1..321: mol_type = other DNA
gaaatagttatgactcagtcgcctgccacactgagtgtctcgcccggcgaaagggctacactgtcttgcagagcctcccaaagcgttagatcatacctggcatggtatcagcaaaaacctggccaggctccaaggctgctcatatacggcgcctcaaccagagccaccggcattccagcccgtttttcagggagtggtagcgggaccgagttcactcttacgatcagctccctacagagcgaggacttcgcagtgtattactgtcaacagcacggcagtttgcccttaacctttggtcaagggacgaaagtcgaaatcaag

SEQ ID NO: 645 - DNA, 348 bp, synthetic construct
  source 1..348: mol_type = other DNA
caggttcagttggtgcagagcggcgcggaggtcaaaaagcctgggagcagcgtaaaagtgtcctgtaaggcctccggcggcacattctcctcatacgctatatcctgggtccggcaggctcctgggcagggcttggaatggatgggtcggattaatcctagcggcgggagcacttcttatgcccaaaagtttcaagggcgcgtgaccatgactcgagataccagtacaagcaccgtctacatggaacttagttcactgaggtctgaggacaccgcagtgtactattgtgctagaggccgatacagttcgtcgtcttggggtcagggtacgcttgtgactgtgtcctcc

SEQ ID NO: 646 - DNA, 321 bp, synthetic construct
  source 1..321: mol_type = other DNA
gacattcagatgacccaatctccatcttcactgtcagcctcagttggggatagagtcaccattacatgcagggcctctcaaagcatctcaacctacctgaactggtatcagcaaaaacccgggaaagcacccaaactgctcatctacgctgcctcctccctccagcgcggcgtgccgagtcgtttctctgggtcagggagcggtacagactttacgctgactatctcctccctacagccagaggattttgcaacttattactgccagcagtcttatactacacccttaaccttcggcggcggcacaaaggttgaaatcaag

SEQ ID NO: 647 - DNA, 360 bp, synthetic construct
  source 1..360: mol_type = other DNA
caggtccagcttgtccagagcggcgccgaagttaagaagcctggggcgtccgtaaaagtgtcctgcaaggcctccggatatactttttctaactactacatgcattgggtgcgacaggcacccggccagggtctggagtgggtgggctggatgaacccgaaaagcgggaatactggttatgcacagaaatttcaagggcgggtgacaatgaccagggacacgagcacgagcacagtttacatggaactcagttcactgcgctcggaggataccgccgtctactattgtgccagaggccggacctggattcagtcctcgctgggttattggggtcagggaactcttgtgacagtgtccagt

SEQ ID NO: 648 - DNA, 321 bp, synthetic construct
  source 1..321: mol_type = other DNA
gacattcaaatgacccagtcacccagctcattgtccgcctctgtaggcgatagagtgactattacttgtagggcttctcagtacatctctcgctggttggcttggtatcagcaaaagccagggaaagcaccaaaactcctgatctatgggagttctaccctacaatccggcgttccatctcgtttctccgggagtggcagcggaaccgatttcaccctcacgataagcagcttacagcccgaggacttcgctacatattactgccaacagtactacagtacacctttcacctttggccctgggacaaagctggaaatcaag

SEQ ID NO: 649 - DNA, 363 bp, synthetic construct
  source 1..363: mol_type = other DNA
caggtccagctcgtccagagcggcgccgaagtgaaaaaacccggagcttcagtgaaagtttcctgcaaagcctccggttataccttcactggttactacattcactgggtccggcaggctccaggccaagggttggagtggatggggtggatgaatccacatagtggcaacaccggatacgcccagaaattccaagggcgggttacaatgacacgtgatacctctacttctactgtgtatatggaactcagctcgctgcgctctgaggataccgctgtgtactattgcgccagggagggcggtcgatacagttctggcagactggggtattggggacaagggacacttgtcacagtatccagc

SEQ ID NO: 650 - DNA, 321 bp, synthetic construct
  source 1..321: mol_type = other DNA
gacattcagatgactcagagtcccagctcactgtcagcttctgtgggcgacagagtgaccattacatgccgcgcaagtcaagggatctcctcctggttggcgtggtatcaacagaagcccggcaaggcacctaagctgctgatctacgcagccagcaccctacagactggggtgccttctaggtttagcggtagtggcagcgggactgacttcacgcttacgatcagctccttacagccggaagattttgccacctactattgtcaacagtccaaatccatacctataacctttggcggcgggacaaaggttgagatcaag

SEQ ID NO: 651 - DNA, 375 bp, synthetic construct
  source 1..375: mol_type = other DNA
caagtgcaactggtgcagagcggcgctgaggttaaaaagccgggcgccagcgtcaaagtgtcctgcaaggcctccggttacacgttcaccggctactacatgcattgggtccggcaggcaccaggccagggcctggaatggatggggaaaatctcagcccactctggggaaaccaagtatgctcagaacgtgcaaggccgagtcacaatgactagggacacgagcacttcgaccgtctacatggagctgtctagcctacggagtgaagataccgcagtgtattactgcgcaagggcgaactactatggggattatgtaaactactattatgggatggacgtctggggacaagggactaccgtgacagtgtcctct

SEQ ID NO: 652 - DNA, 321 bp, synthetic construct
  source 1..321: mol_type = other DNA
gacattcagatgacacagtctccaagctccctgtccgcttcagttggagatcgcgttacaattacctgtcaggcctcccaggacatcagtaattacctgaattggtaccagcagaaacccggcaaagctcccaaacttctcatatacaaggcctccagcctcgagagcggcgtgcctagtagattttctggttctgggagtggcacagatttcaccttgaccatttcaagtttgcagcctgaggacttcgccacttattactgtcaacagacttatacgatacccatcacatttgggcagggaactcgtttagagatcaag

SEQ ID NO: 653 - DNA, 357 bp, synthetic construct
  source 1..357: mol_type = other DNA
gaagtgcagctgctcgaaagcggcggcgggctggtgcagcctggaggttcattacggttgtcatgcgcagcgagcggcttcaccttctcctcccgcgctatgagttgggtgcgacaggcacctgggaaaggcctggagtgggtatccaggattaattatgatgggtctgccacaacttatgccgactctgttaagggccgatttaccatatcccgcgacaattccaaaaacacgctgtacttgcagatgaactcgcttagagctgaggacaccgcggtgtactattgcgccagaggcataactatttttggggtcttcgattactggggacaagggacacttgtaaccgtgtcctcc

SEQ ID NO: 654 - DNA, 321 bp, synthetic construct
  source 1..321: mol_type = other DNA
gacattcagatgactcagagcccatcttcgctgtcagctagtgttggggatagagtcaccatcacctgtagggcttctcagtcaatctctacatggctcgcctggtatcaacagaagccaggcaaggcacccaaactgctgatctaccgggccagcaacctccagagcggcgtgccgagtcgttttagcggctctggaagtggtactgatttcacgctcaccatctccagcctacagcccgaggactttgccacatattactgtcaacaaagctacagcacacccttaactttcggcggaggcacaaaggtcgaaatcaag

SEQ ID NO: 655 - DNA, 363 bp, synthetic construct
  source 1..363: mol_type = other DNA
gaagtccaactgctcgaatctggcggcggcttggttcagcctggcgggagcttgcggctctcatgtgctgccagcgggttcaccttctcctcctatgccatgcattgggttcgccaggcacccggcaagggcttagagtgggtgtcttacataagtagtagtggcagcaccgtgtactacgccgattctgttaaagggaggttcaccatctcccgggataatagcaagaatacgctgtacctccagatgaactccctgagagcagaggacaccgccgtgtactattgcgccagagtatctaacgtcactcccaggagcgggtttggctattggggtcagggaacgcttgtaacagtgtccagt

SEQ ID NO: 656 - DNA, 321 bp, synthetic construct
  source 1..321: mol_type = other DNA
gacattcagatgactcagagcccgagttcactgtcagcttcggtcggagatcgcgtgaccataacttgcagggcttctcagtcaatcagccgatacctgaactggtatcaacagaagcctgggaaagcgcctaagctgctgatctactcagcatccactctccaaagcggcgtgccctcccgttttagcggctctgggtctgggacagacttcacactaacaataagtagtttacagccagaggactttgctacctattattgtcaacaggcccactctttcccgccatcctttgggcagggtacaaaacttgaaattaag

SEQ ID NO: 657 - DNA, 363 bp, synthetic construct
  source 1..363: mol_type = other DNA
caagtgcagctggctcagtctggggcagaagtcaaaaaacctggcgcctctgtaaaagtgtcctgcaaggcctccggctataccttcacccggcactacatccagtgggtgcggcaggcacctggacaaggcttagagtggatggggtggattaatcccaactccggcaatacgggctatgcccaaaaattccaagggcgcgttaccatgactcgagatacgtccacatctacggtctacatggaactgagttccttgcgctcggaggacacagcggtgtattactgcgctagaggcaggcaatggctccgtggggaatacttccagcactggggacaagggacccttgtcacagtttccagc

SEQ ID NO: 658 - DNA, 321 bp, synthetic construct
  source 1..321: mol_type = other DNA
gacatccagatgacccagtcaccatcttccctgtcagcgagcgtgggcgacagagtaactattacctgtcaggctagtcaagacattagcagatacctcaactggtatcagcaaaagcccgggaaggcacccaagctgctcatctacggtgccagcaacctgctgagcggcgtgcctagcaggttttctggaagtggttctgggacagatttcactcttacaataagtagcctacagccggaggattttgccacctactattgtcaacaaactcatactactccatatacctttgggcaaggcacaaggttagagatcaag

SEQ ID NO: 659 - DNA, 354 bp, synthetic construct
  source 1..354: mol_type = other DNA
caagtgcagctggtacagagcggcgcagaggtcaaaaagcctggcgcgagcgtcaaagtgtcctgcaaggcctccggcgggagttttagcggctatgctgtgtcctgggttcggcaggcgcctgggcagggtttggagtggctgggcgtaattaatccatccgattcttggaccgccttcgctcagaaatttcagggccgcgttactatgactcgagatacttctacttctaccgtctacatggaacttagtagtctcaggtctgaggacacggcagtgtactattgcgctagggaacgcgaggatgatgccttcgacatctggggacaagggaccacggtcacagtgtcctcc

SEQ ID NO: 660 - DNA, 321 bp, synthetic construct
  source 1..321: mol_type = other DNA
gacatacagatgacacagtcgccctcatcactgtcagcctctgttggggatagagtgaccattacctgtagagcttcgcaagggattaggaactggttggcctggtaccagcagaagcccggcaaagcaccaaagctgctgatctacagagcaagcacgctacagagcggcgtgcctagccgttttagcgggagcggtagtggcacagacttcacccttaccatctcctccttacaacccgaagacttcgccacatactattgtcaacagagttatacaactccgtttacattcgggcagggtacaaagctcgagatcaag

SEQ ID NO: 661 - DNA, 363 bp, synthetic construct
  source 1..363: mol_type = other DNA
caagtgcagctcgttcagtctggggcagaagtgaaaaaacctggggcgagtgtcaaagtgtcctgcaaggcctcaggcggcacattctcaagttatgccatctcctgggttcggcaggctccaggccagggcttggaatggatggggataattaatccgcgtggcgggtcaaccaactacgctcagaagttccaagggcgggtaacaatgaccagagataccagcactagcaccgtctacatggagctcagctccctacgctcagaagataccgccgtgtactattgtgcaagggaaggttctagctggtattatgacgcctttgatatatggggacaaggaactatggtcacagtgtcctcc

SEQ ID NO: 662 - DNA, 321 bp, synthetic construct
  source 1..321: mol_type = other DNA
gacattcagatgactcagagccctagctcgctgtcggcttctgtaggcgatagagtgactattacttgccgagcttctcagagtatttccagctacctgaattggtaccagcagaagcccggcaaagcacccaagctgctgatctacgcggcctataaccttcaatctggggtgccatcaaggttcagcggctccgggtctggcacagacttcacccttacaatcagtagcttacagcccgaggactttgccacctactattgtcaacagtcctactcaatcccttttacgtttggaggtggcacgaaggttgagatcaag

SEQ ID NO: 663 - DNA, 363 bp, synthetic construct
  source 1..363: mol_type = other DNA
caggtccagctcgtacagagtggcgcagaggtcaaaaaaccgggcgccagcgttaaagtgtcctgcaaagcctccggtggcacattctcctcctacgctatctcctgggttcggcaggctccaggtcaagggctggaatggatggggtggatgaatcccaactccggcgatacacattatgcccaaaagtttcagggccgcgtaaccatgactagggacacctctacgtcaactgtctacatggagctgtcatcactaagatctgaagatactgccgtgtactattgtgcccgagaagggtctagttggtactacgatgcttttgatatttggggacaaggcacccttgtgactgtgtcgtcc

SEQ ID NO: 664 - DNA, 321 bp, synthetic construct
  source 1..321: mol_type = other DNA
gacattcagatgacacagagccctagcagtctgtcagccagcgttggcgacagagtgaccatcacctgtagggcttctcagtcaataagccggtggttggcatggtatcaacagaagcccgggaaggcacccaagctgctgatctacgcagcgagcaccctccagaccggcgtgccatcgcgttttagcgggtctggcagcggcacagacttcacccttacaattagtagtttacagcctgaggactttgcgacttactattgcttgcagcacagctcttatcctttcacgttcgggcaagggacaaaggtggagatcaag

SEQ ID NO: 665 - DNA, 348 bp, synthetic construct
  source 1..348: mol_type = other DNA
caggtccagctcgtccagtctggggctgaagtgaaaaaacccggcgccagcgttaaagtgtcctgcaaggcctcaggctattccttcacctcccactacatgcattgggttcggcaggctcctggccaagggttagaatggatgggttggatgaacccgaactccggcaataccggttatgctcagaagttccaagggcgagtcacaatgactcgtgatactagcacttctacagtgtatatggagctgagtagtctgcgcagtgaagatactgccgtatattactgtgcacggcttgggcagcagctggattactggggacaagggactcttgtgaccgtgtcctcc

SEQ ID NO: 666 - DNA, 321 bp, synthetic construct
  source 1..321: mol_type = other DNA
gacattcagatgacccagtcgccctcgtcactgtcagcgagtgtgggcgatagagtaaccatcacctgtagggcatctcagagcatccgcaattacctcaactggtaccagcagaagccagggaaagcacccaagttgctgatttacgaggcctccagactacagtctggtgtgccgagcaggtttagcggttccgggtctggcacagacttcacgctcacaataagtagcttgcagccagaggactttgccacctattactgccaacaaagctatagcgctccacctacatttgggcctggcacgaaggttgacatcaag

SEQ ID NO: 667 - DNA, 366 bp, synthetic construct
  source 1..366: mol_type = other DNA
caagtgcagctcgtccagtctggggctgaagtgaaaaaaccgggtgcctccgtcaaggtgtcctgcaaggcctcaggctacactttcatagggtactacatgcattgggtacggcaggcacctgggcaaggtctagaatggatggggcggattaatcccaactccggcgaaactaactatgctcagaagtttcagggccgagtaaccatgactagggacaccagcaccagcacggtctacatggagctgtcatctttgaggagcgaggacaccgctgtgtactattgcgctagagttagagtgcgcggcgtgatacaccctggctttgatccctggggtcagggaacacttgtcaccgtgtcctcc

SEQ ID NO: 668 - DNA, 321 bp, synthetic construct
  source 1..321: mol_type = other DNA
gacattcagatgacacagagtcccagctccctgtcagcctcggttggggaccgcgtcaccatcacctgtcaggcctcacaagatattagtaattacctgaactggtatcagcaaaaacctggcaaggcaccaaagctgctgatctacgcggcaagctccttacagtctggggtgccctcgcgttttagcggaagtggaagtggcacagatttcacgcttactatctcaagcctccagcctgaggatttcgccacttattattgtcaacagtcttatagcacaccagtgacattcgggccagggacaaaagttgacatcaag

SEQ ID NO: 669 - DNA, 363 bp, synthetic construct
  source 1..363: mol_type = other DNA
caagtgcagttagttcagtctggtgcggaggtgaaaaaacctggggcatctgtgaaagtgtcgtgcaaggccagcggctatacctttcggaactactacatccactgggtccgccaggctcctggtcagggcctagaatggatgggcaggattaatccaaactcaggcggcacaaactacgcccagaagtttcagggacgtgtgactatgactagggatacctccacctccaccgtctacatggaactgagtagtctcagatctgaggatactgctgtgtactattgcgcccgcgccagaattgctgtcgccgtttccgggttcggctattggggtcagggaacattggtaacagtgtcaagt

SEQ ID NO: 670 - DNA, 321 bp, synthetic construct
  source 1..321: mol_type = other DNA
gacattcagatgactcaaagcccatcatccctgagtgcctctgtgggcgaccgggtcacaataacctgtcaggcatcacaggacatcagcaattacctgaattggtatcagcaaaagcccgggaaagctcccaagctgctgatatacgcagcgagcagcctccatagcggagtaccttctcgattcagcgggtccgggtccgggaccgatttcactcttacaatcagctcattgcagcccgaagattttgcaacctattattgtcaagagtcctcgtcctttccgtacacgttcgggccagggacgaaagttgacatcaag

SEQ ID NO: 671 - DNA, 354 bp, synthetic construct
  source 1..354: mol_type = other DNA
caggtccagctcgtccagagtggcgcggaagtgaaaaagcctggcgccagcgtaaaagtgtcctgcaaggcctccggctataccttttcacggtggtatatgcattgggtccggcaggcaccaggccaagggctggaatggatgggtcgcattaatcccaactccggcggcactaactatgctcagaaattccaagggcgagtaactatgactagggacacatctaccagcacagtttacatggagctgtcaagtttgaggtctgaggataccgccgtgtactattgcgccagagttggcggttatgggtggtttgatccttggggacaagggaccctggtgacagtgtcctcc

SEQ ID NO: 672 - DNA, 321 bp, synthetic construct
  source 1..321: mol_type = other DNA
gacattcagatgacgcagagcccatcttccctatccgcttcggttggggatagagtgactattacctgtcaggcaacgcaggacatacgcaattacctgaactggtaccagcagaaacccggcaaggctccgaagctgcttatctacgcaacatcatcattacaaagcggagtgccatctcgtttttctgggagtgggtcaggcacagatttcaccttgaccatcagctcgcttcagcccgaggacttcgccacctactattgtcaacagagttacagccctccgtacacgttcgggcagggaacaaagctcgaaatcaag

SEQ ID NO: 673 - DNA, 363 bp, synthetic construct
  source 1..363: mol_type = other DNA
caagtgcagctggtacagtcaggcgccgaagtcaaaaagcccggagcctcggttaaagtgtcctgcaaggcctctggttacactttttcccggtatttcatgcattgggtgcggcaggcacctggccagggtttggagtggatggggtggattaatcccaactccggtggcaccaactacgcccaaaagtttcagggaagagtgactatgaccagggatacctcaacttccaccgtctacatggaactcagctctctgcgcagcgaggacaccgctgtgtactattgcgctagagtccgaattgggtggctccagtcacctccactgtactggggacaagggacacttgttacagtttcctct

SEQ ID NO: 674 - DNA, 321 bp, synthetic construct
  source 1..321: mol_type = other DNA
gacattcagatgacacagtctccaagcagtttgagcgccagtgtgggcgaccgtgtaactatcacgtgtagagcaagtcagtcaatcagcacatggctcgcatggtatcaacagaagcccggcaaagctccaaaactgctgatctacgcggcgagcagtttacagtccggcgtgccttcgaggttttctgggtccgggtccgggaccgatttcacccttacaataagcagcctacagcccgaggattttgctacgtactattgtcaacagtcttatgggttcccgtggactttcggccagggtacaaaggtcgaaatcaag

SEQ ID NO: 675 - DNA, 360 bp, synthetic construct
  source 1..360: mol_type = other DNA
caggtccagctggtgcagagcggtgcagaagtcaagaagcccggtgcaagcgtaaaagtgtcctgcaaggcctccgggtacaccttcaccggttatttcatgcattgggtccggcaggctcctggccaagggttggaatggatgggctggatgaatcccaactccgggaataccggctacgctcaaaaatttcaagggcgcgtgaccatgacaagggatacaagcacctccaccgtgtatatggagctcagctctctgagatcagaggatacagccgtttattactgcgttcgagggaggacttggattcagtcaagcctggggtactggggtcagggaacgcttgtgacagtctcatct

SEQ ID NO: 676 - DNA, 321 bp, synthetic construct
  source 1..321: mol_type = other DNA
gacattcagatgactcagtctccaagctcgctgtcagctagtgttggcgacagagtaactatcacttgtcgggcctcgcagtccatctcctcatatctcaactggtatcaacagaaaccgggcaaggcacctaagctgctcatttacgcggcctcctccctacagtctggggtgcctagtcgttttagcgggtctggctctgggaccgacttcactcttacaataagtagtttgcagccagaagatttcgccacttactattgtcaacagagttactctacgcccttaacctttggcggcggcacaaaagtggagatcaag

SEQ ID NO: 677 - DNA, 378 bp, synthetic construct
  source 1..378: mol_type = other DNA
caagtgcagctggtccagtctggggcggaagtgaaaaagcccggagctagtgtaaaggtgtcctgtaaagccagcggctacaccttcaccggttattacctgcattgggtccggcaggctcctggccagggcctggagtggatgggctggatttccgcatataacggaaacacaaattacgcccagaacctgcaaggccgcgtgaccatgaccagggacacaagcactagcactgtctacatggagttgtctagcttgagaagcgaagataccgctgtgtactattgcgcccgacactcttactcgggctcatactcaacgctaccctattatgggatggatgtttggggtcaagggacaacggtcacagtatcctct

SEQ ID NO: 678 - DNA, 321 bp, synthetic construct
  source 1..321: mol_type = other DNA
gacattcagatgacccagtcaccaagttccttatccgcaagcgttggggatcgtgttacaattacttgcagggcctcgcaagggatctctaattatctcgcttggtaccagcagaaacctgggaaagcacccaagctgctgatctacactgcaagcacactttttccaggagtgccgtcaagattctctgggtccgggagtggcactgacttcacccttaccatctcctccctccagcctgaggactttgccacatattattgtcaacagagttactccataccactcacgtttggcggcggaacaaaagttgaaatcaag

SEQ ID NO: 679 - DNA, 363 bp, synthetic construct
  source 1..363: mol_type = other DNA
caggtccagttggtacagagcggcgccgaagtgaaaaagcctggggcgtccgtcaaagtgtcttgcaaggcctccggctatacattcaccgggtactacatgcattgggtgcggcaggcacctggccagggtctagaatggatgggccggatcaatcccaactccggcggcacaaactatgctcagaaatttcaaggtcgcgtcaccatgacccgtgacacaagtacgagcaccgtctacatggagctgtcctccctcaggagcgaggatacagccgtgtactattgtgcaagggagcgcgccggctatagcagcgggcagttcgattattggggacaagggactctggtaactgtgtcctcc

SEQ ID NO: 680 - DNA, 321 bp, synthetic construct
  source 1..321: mol_type = other DNA
gacattcagatgactcaatctccctcgtcactgtcagctagtgttggggatagagtgactattacctgccgagccagtcagtcaatatctaactggctcgcatggtaccagcagaagccagggaaggctcccaaactgctgatctacgccgcgagcacccttcagaatggcgtgccgtctagatttagcggttctgggtctgggaccgactttacacttactatcagtagtttacaaccagaggactttgctacttattactgtcaacagagctacaccttccctattacgttcggccagggaacaaaagttgaaatcaag

SEQ ID NO: 681 - DNA, 363 bp, synthetic construct
  source 1..363: mol_type = other DNA
caggtccagctggttcagtctggcgcggaagttaaaaagccaggcgcctccgtcaaagtgtcctgcaaggcctccggctatactttcaccggttattacatgcattgggtgcggcaggcacctgggcaagggctggaatggatgggatggattaacccgaactccggaggcacacactatgcccaaaagtttcagggacgggttacaatgactcgtgacacttcaactagcaccgtctacatggagcttagtagtttgaggtcagaggacaccgctgtgtattactgcgctagagtgcgaatcgggtggctgcagagtccaccactgtactggggacaagggactttggtaacagtgtcaagc

SEQ ID NO: 682 - DNA, 321 bp, synthetic construct
  source 1..321: mol_type = other DNA
gacattcagatgacccagtcgccgtcctccctatccgccagtgtcggtgatcgcgtaaccattacgtgtagggcctctcaagggatcagcaattacctcgcatggtaccagcagaaacccgggaaggcacccaaactgctgatctacgctacaagcagactccagtcaggcgtgccctctcgcttctctggcagcgggtctggcaccgatttcacccttacaataagtagcctccagcctgaggattttgctacgtattattgtcaacagagctacaagactcccttaacctttggcggcgggacaaaagtggaaatcaag

SEQ ID NO: 683 - DNA, 363 bp, synthetic construct
  source 1..363: mol_type = other DNA
caagtgcagctggtccagagcggtgccgaagtgaaaaagcctggggcgtccgtgaaagtgtcctgtaaggccagcggatataccttcaccaactactacatgcattgggtccggcaggctcccggccaagggctggaatggatggggtggattaatccaaaatctggcggcacttcttatgcacagaagttccagggccgcgttactatgactagggatacaagcaccagcactgtctacatggaactgtcgagtttgagaagtgaggatacagcagtgtattactgcgccagcgggaagcaatggctcgtaggaggtcgattcgactattggggtcagggaacacttgtcaccgtttcatcc

SEQ ID NO: 684 - DNA, 357 bp, synthetic construct
  source 1..357: mol_type = other DNA
caggtccagctggttcagtctggcgcagaagtgaaaaagcctggggcatctgtaaaggtgtcctgcaaggcctccggatataccttcactagatattacatccactgggtgcggcaggcacctgggcaagggctggaatggatggggtggatgaatccgaactccggcaataccgggtttgcccaaaaactgcaagggcgagtaacaatgaccagggataccagcacaagcacggtctacatggagctcagctccctccgctctgaggacaccgctgtgtactattgtgcccgcggtccctttcctagaggacggctcgacctgtggggacaaggcacacttgtcacagtgtcctcc

SEQ ID NO: 685 - DNA, 321 bp, synthetic construct
  source 1..321: mol_type = other DNA
gacattcagatgactcagtctccaagctccttgtcagcgagtgttggggatagagtgacaataacttgcagggctagtcagggtattagtcggtggctaggctggtaccagcagaaacccgggaaggctccaaaactgctgatctacggcgccagcaacttgcagactggggtgccctcgcgtttctcaggctcaggctctgggactgacttcacccttaccattagtagcttacagcccgaagattttgccacctattattgtcaacagtcatacagctctccaaggacgttcggccagggtacaaaggttgagatcaag

SEQ ID NO: 686 - DNA, 360 bp, synthetic construct
  source 1..360: mol_type = other DNA
caggtccagctggtccagtcaggcgccgaagtgaaaaagcctggggcgtccgtgaaagtgtcctgcaaagcctccggctatacatttacccgatactacatgcattgggtgcggcaggctccaggccaagggctggaatggatggggataatcaatcccacaggcgggtctacatcgtatgcacagaagttccaagggcgcgtcactatgactcgagacacctctactagcacggtctacatggaactaagtagcctccgcagcgaggataccgccgtgtattactgcgctagaggcaggacctggattcaatctagcctggggtattggggtcagggaacacttgttaccgtgtcctcc

SEQ ID NO: 687 - DNA, 318 bp, synthetic construct
  source 1..318: mol_type = other DNA
gacatacagatgacacagtctcctagttccttgtcagcttcggttggcgatagagtaaccattacatgcagggcctctagatcaatcaacaggtggttggcgtggtatcaacagaaacccgggaaagcaccaaaactgctgatctacggagcatcaactttacagagtggcgtgcctagccgtttttctggcagcggtagtggtactgacttcacacttacgattagtagcctccagccggaggatttcgcaacatactattgtcaacagagctacagcactcccacctttggcggcggcacgaaagttgagatcaag

SEQ ID NO: 688 - DNA, 363 bp, synthetic construct
  source 1..363: mol_type = other DNA
caagtacagttagtgcagagcggagccgaagttaaaaaacctggggcgtcagtcaaagtctcatgcaaggcctccggctataccttcacctcatactacatgcagtgggttcggcaagctcccgggcagggcctggagtggatgggctggatgaaccctaattccggcaatactggttatgcacagaagttccagggccgcgtgactatgaccagagatacctccacttccaccgtctacatggagctaagctccctccgtagcgaagacactgctgtgtactattgtgcacgagtgcgcatcgggtggctgcagagtcctccgttgtactggggtcaagggacactcgtgacagtgtccagc

SEQ ID NO: 689 - DNA, 321 bp, synthetic construct
  source 1..321: mol_type = other DNA
gacattcagatgacccagtcaccttcttcactgtcagcctctgtgggcgaccgggttacaattacatgcagagcttcgcagggaatctccaactatctggcttggtatcagcaaaagcccggcaaagcacccaagctccttatctacgcagcgagcagtttgcagtctggggtacccagtaggtttagcgggtctgggagtggcacagattttactctgacgataagtagccttcagccagaggatttcgccacgtactattgtcaacagtcctactcgattccattcacgtttgggccagggacaaaagtcgacatcaag

SEQ ID NO: 690 - DNA, 360 bp, synthetic construct
  source 1..360: mol_type = other DNA
caagtgcagctcgttcagagcggcgcggaggtcaagaagcctggcgcctcagtcaaagtctcttgcaaggcctccggctatactttcaccacgtattacatgcattgggtgcggcaggctcccggccagggcctggaatggatgggaattattaatccgagcggcgggagtacaagctacgctcagaaattccagggacgggtgactatgacccgagacaccagcacatctactgtctacatggagctgagtagcttgcgctcagaggacaccgccgtgtactattgtgcacgcgggaggagctggtatagaagcaacgtagactattggggacaagggacacttgtaacagtgtcaagt

SEQ ID NO: 691 - DNA, 321 bp, synthetic construct
  source 1..321: mol_type = other DNA
gacattcagatgactcagagtccatcgtcactgtcagccagcgttggggatagagtgaccatcacttgcagggctagtcaaagtatctcctcctggctcgcatggtaccagcagaaacctgggaaggctcctaaactgctgatatacgcagcgtcctcccttcagtctggagtgccctcgagatttagcggctctggctccggcacagatttcaccctaacaatatccagcttgcagcccgaagattttgccacctattactgtcaacagtcttactctacaccaaggacgtttggtcaagggacccgtttagaaatcaag

SEQ ID NO: 692 - DNA, 375 bp, synthetic construct
  source 1..375: mol_type = other DNA
caggttcaactggtccagtctggggcagaagtgaagaagcctggagcttctgttaaagtgtcctgcaaggcctccggtcacaccttcactcgatattacatgcattgggttcggcaggcacctggccagggtttggagtggatggggtggattaatccgaactccgggaatactggggacgctcagaaatttcagggccgcgtgaccatgacacgggataccagcaccagcaccgtctacatggaactcagctccctgcgctccgaagatacggcagtgtactattgcgctagggacagaggcatagtggtggtgcccgctgccatcggaggcatggacgtatggggacaaggcaccatggtcacagtgtcaagt

SEQ ID NO: 693 - DNA, 336 bp, synthetic construct
  source 1..336: mol_type = other DNA
gacattgtcatgactcaaagtccattgagtctgccagtgacacctggggagcccgcgagcatctcttgtaggagcagccagtccctcctgcactccaacggctataactatctcgactggtacctacagaaacccgggcagagccctcagttactgatctaccttgggtcgaatagggcctctggggtgccagatagattctcaggatctggaagtggcactgatttcacactgaagataagtagagtcgaggccgaggatgttggcgtctactattgtatgcaggcccttcagacacccattacgtttggccaaggcactcgtctggagatcaag

SEQ ID NO: 694 - DNA, 351 bp, synthetic construct
  source 1..351: mol_type = other DNA
caagtgcagctcgtccaatctggggctgaagtgaaaaagcctggagcctccgtgaaggtgtcctgcaaggcctccggctacactttcacgggctatttcatgcattgggtgcggcaggcacccgggcagggactggagtggatgggcaggattaatcccaactccggcgggacaaattacgcgcagaagtttcagggccgcgttaccatgactagagataccagcacttcaaccgtttacatggagctgagcagtctgcgcagcgaggacacggctgtctactattgcgctagaggaaaagggcgatatttcgacctgtggggtagaggcacactcgtaacagtctccagt

SEQ ID NO: 695 - DNA, 336 bp, synthetic construct
  source 1..336: mol_type = other DNA
gacattgttatgactcaaagtcccttgtccctgcccgtgactcctggcgaaccagcctcaatctcctgtcgaagctctcagagccttctccactctaatggctataactatctggactggtaccttcaaaaaccgggccagagtcctcagctcctaatctacttgggatctaacagggcctctggggtgccagataggtttagcggtagtggcagcggcacagatttcaccctgaaaatttcgcgggtagaagcagaggatgtgggtgtctactattgtatgcagggaacacattggccaataacctttgggcagggaacccgtttagagatcaag

SEQ ID NO: 696 - DNA, 366 bp, synthetic construct
  source 1..366: mol_type = other DNA
caggtccaactggtccagtctggggcagaagtgaaaaaacccggcgcctccgtaaaagtgtcctgcaaggcctccggctacactttcacccgatactatctccactgggtccggcaggctcccggtcagggcttagagtggatggggtgggttagtgcatacaatggaaatacaaactatgcgcagaaattccaagggcgcgtgaccatgacccgagacaccagcacttctactgtctatatggagctttcctccctcaggagtgaggatactgccgtgtactattgcgctagaggttactgctcaggcgggtcatgttattggtttgatccctggggtcaagggacgcttgtgaccgtgtcctcc

SEQ ID NO: 697 - DNA, 336 bp, synthetic construct
  source 1..336: mol_type = other DNA
gacattgtgatgacccagtctccgctgtcactcccagtgacacctggcgaacccgcttcaataagttgtagaagcagtcagtctttgctgcatagcaacggctacaactatctagattggtacttgcagaagcctgggcagtcgccacaactgctgatctacctgggcagcaatagggcatctggggtgcctgaccgctttagcggcagcggtagtggcacagacttcacgctgaaaattagccgtgtagaggccgaagatgttggggtctactattgtatgcaggccctccagactccattaacatttggacaaggcacaaaggttgagatcaag

SEQ ID NO: 698 - DNA, 354 bp, synthetic construct
  source 1..354: mol_type = other DNA
caggttcagctagttcagagcggagccgaggtcaagaagcccggagcgtctgtgaaagtgtcctgcaaagcctccggaggcacattctcctcctatactttgagttgggttcggcaggcacctggccagggcctggagtggatgggatggattcacccgaaaagcggcgtgaccaagaatgcacagaaattccaagggcgggtgactatgacccgagatacttccacgtctaccgtctacatggaactcagctcactgcgctcagaggacaccgctgtgtactattgcgctagaggctgggtgtacggcaggatggacgcctggggtcagggtactacggtcacagtcagtagc

SEQ ID NO: 699 - DNA, 324 bp, synthetic construct
  source 1..324: mol_type = other DNA
gaaatcgtcatgacccagtctcccgccacactgagtgtatcgcctggggagcgcgccactctgagttgtagagcaagccagagcgtgtcgtccaattacctggcttggtatcagcaaaagcctgggcaggcacccaggttgcttatctacggcgcgtcaactagggctaccgggataccagcccgtttttccgggtctggttcagggaccgaattcacgctcacaattagcagtttacagagcgaagattttgccgtgtactattgtcaacaatacgggacacttccatatacctttggccaaggcacaaaagtggagatcaag

SEQ ID NO: 700 - DNA, 366 bp, synthetic construct
  source 1..366: mol_type = other DNA
caggtccagctcgtgcagtccggagcagaagttaagaagcctggcgcgtctgtgaaagtttcctgcaaggcctcaggttactccttcaccacctattacatccactgggtgcggcaggctcccgggcagggcttggagtggatgggtattattaacccatctggcgggtctacaagctacgctcaaaagtttcagggtcgggtcactatgacacgagatactagcacatctaccgtctacatggagctgagcagtctgcgcagcgaggacaccgctgtgtactattgcgcccgcggcggctactatggctccggatacaattcagtcggttattggggaccagggacgcttgtaacagtatcaagc

SEQ ID NO: 701 - DNA, 324 bp, synthetic construct
  source 1..324: mol_type = other DNA
gaaatagtgatgacccagtcacccgccaccctgagtgttagccctggggaaagggcaaccctgagttgtagagcgtcgcagtcggtgtcctccaacaccctggcatggtatcagcaaaaacccgggcaggctcctaggctcctaatctacggcgcctctactcgtgccactggcattcccgccagatttagcgggagcgggtccggcacagagtttacgcttacaataagttccttgcagtcagaagatttcgcagtgtactattgtcaacaatatggatcttctccgttaacgttcgggccaggcacaaaagtggacatcaag

SEQ ID NO: 702 - DNA, 360 bp, synthetic construct
  source 1..360: mol_type = other DNA
caggttcagttggtccagtctggcgcggaagtaaaaaagcctggagcgtcagtgaaagtgtcgtgcaaggctagtggctataccttcaccaattactacatgcattgggtgcggcaggcaccaggccagggcttggagtggatgggctggatgaatcccaactccgggaacaccggctatgctcagaacctgcaagggcgagtcacaatgacccgagataccagcactagcactgtctacatggagctgtccagcctgcgctcagaggacaccgccgtgtactattgtgcccgcgggaggacttggtttagatccggaatggacgtgtggggtcagggaacgacggtcacagtgtccagt

SEQ ID NO: 703 - DNA, 318 bp, synthetic construct
  source 1..318: mol_type = other DNA
gagattgttatgactcagtctccggccacactgagtgtttctcctggcgaaagggcaactctcagttgcagagcatctcaaagcgtgtcctcctacctagcttggtatcaacagaaacccgggcaggcacctaggctgctcatctacggcgcctcgaccagagccaccgggattcccgcccgttttagcgggtctgggagcgggactgagttcaccttaacaataagtagccttcagtcagaagacttcgctgtgtactattgtcaacagtatgatatatctgtgacgtttgggccaggcacaaaggtcgatatcaag

SEQ ID NO: 704 - DNA, 351 bp, synthetic construct
  source 1..351: mol_type = other DNA
caggtccagctggttcagtctggcgcggaagtgaaaaagccgggcgcctccgtcaaagtgtcctgcaaggcctccggttacaccttcactgactattacatccactgggtccggcaagcacccgggcagggcctggaatggatggggtggatttctacttataatgggaacacgaattatgcacagaaactccagggccgcgtcactatgacccgggatacaagcactagcaccgtctacatggagctaagtagcttgcgtagcgaggacaccgctgtgtattactgtgccagaggcatggtgcgaggcatggatgtatggggacaaggaacaatggttactgtttctagt

SEQ ID NO: 705 - DNA, 339 bp, synthetic construct
  source 1..339: mol_type = other DNA
gacattgtgatgacccagtcaccagatagccttgcagtgtccctgggagaaagggctaccattaattgcaagagcagtcagtcagtgctctactcaagcaacaacaaaaactatttggcttggtaccaacagaagcccgggcagcctcctaagctgctgatctactgggcctctacaagggagtctggggtgccagatcgcttttccgggtccggctccgggacagacttcacgcttacaataagtagtctccaggctgaggacgtagccgtgtactattgtcaacaatactatactacaccctggacctttggccagggaaccagattagagatcaag

SEQ ID NO: 706 - DNA, 354 bp, synthetic construct
  source 1..354: mol_type = other DNA
caagtgcagctggtgcagtctggagcggaagtgaaaaaacctggcgccagtgtgaaagtgtcctgcaaggcctccggttatactttcacgggctatcggatgcattgggttcggcaggcacctgggcaaggactagagtggatgggcgtaattaatccaaatactgggaccgctcgctttgctcagaagtttcagggacgagtcacaatgactagggatacatcaaccagcactgtctacatggagctgagcagcctcaggagcgaagacaccgcggtctactattgtgcttctgtgggcgtctactggtattttgacctgtggggtagaggcacacttgtaaccgtgtcctcc

SEQ ID NO: 707 - DNA, 339 bp, synthetic construct
  source 1..339: mol_type = other DNA
gacattgttatgacacagtctcccgatagcctcgccgttagtctcggcgagcgtgccacgataaactgcaaatcttctcagtccgtgttgtactcaagcaacaacaagaattatctggcatggtaccagcagaaacctgggcaaccacccaaactgctgatctactgggcctcaacccgcgaatctggggtgccggatagattcagcgggagcggctccgggacagatttcacccttactatctcgagtttgcaggctgaggacgttgccgtctactattgtcaacagtactattcagcacccttaaccttcggcggcggcacaaaagtggaaatcaag

SEQ ID NO: 708 - DNA, 363 bp, synthetic construct
  source 1..363: mol_type = other DNA
caggttcagctggtacagtcaggcgccgaagtgaaaaaaccgggtgccagcgtcaaggtgtcctgcaaggcctccggctacaccttcaccggatattacatgcattgggtccggcaggcacccggccaagggctggaatggatggggatgattaatcctagtggtggcgggaccacatacgctcagaagttccaagggcgggttacgatgactcgagacaccagcacgtctaccgtctacatggaactgtccagcctacgctctgaggatactgccgtgtactattgtgcaagggacaggagatcaatgattacctttcgcacagattattggggtcagggaactctcgttaccgtgtcctcc

SEQ ID NO: 709 - DNA, 339 bp, synthetic construct
  source 1..339: mol_type = other DNA
gacattgtaatgactcagagcccagatagtcttgcagtgtccttgggcgagagggctacaatcaactgcaagagcagtcagagcgtgctctactcgtctaacaacaaaaattaccttgcgtggtatcaacagaaacccgggcagcctcccaaactgctgatctactgggcttctactagagagtctggcgtgcctgatcgttttagcggttccgggtctgggacagacttcacgttaacaataagtagcctccaggctgaggacgtcgccgtgtactattgtcaacagtactattcaacaccatatacttttggccaaggcaccaagttggagatcaag

SEQ ID NO: 710 - DNA, 369 bp, synthetic construct
  source 1..369: mol_type = other DNA
caggtccaactggtccagtctggcgcggaggttaaaaagcctggggcttcagtcaaagtgtcgtgtaaggcctcgggctatacattcaccggctattacatgcattgggtccgtcaggcacctgggcaagggctggaatggatgggttggatgaatccgaactccgggaataccggttatgcccaaaaattccaagggagagtaactatgacacgagacaccagcactagcaccgtgtatatggaactcagctctctgaggagcgaggacacagccgtgtattactgcgcgggccggaaatggctgggcttggatttctacaactggtttgatccttggggtcagggaactcttgtaacggtgtccagt

SEQ ID NO: 711 - DNA, 339 bp, synthetic construct
  source 1..339: mol_type = other DNA
gacattgtgatgactcagagtccggatagccttgcagtgtctttgggcgagcgcgccactattaattgcaaatcctcccagtccgttctctacagctcaaataacaagaactatctcgcatggtaccagcagaagccaggacagccaccaaaactgctgatatactgggctagtaccagacagtctggcgtgcccgacaggttttcagggtccgggagcggcacagacttcacgctaacgataagtagtttacaggccgaggatgtcgctgtgtattactgccagcagtactactctacaccctggacctttgggcaaggcacaaaggttgaaatcaag

SEQ ID NO: 712 - DNA, 348 bp, synthetic construct
  source 1..348: mol_type = other DNA
caggttcaactggtacagagcggcgcggaagtgaaaaaacccggctcgtcagttaaagtgtcctgtaaggcctccggcggcacattctcctcctacgctatctcctgggtccggcaagcacccgggcaaggtctggagtgggtgggtggcataatgcccatattcgggacagcgaattacgctcagaagtttcagggaagagtgactattaccgccgatgaatctccatctacggcttatatggaactctccagtctgcgcagcgaggacaccgctgtgtactattgcgccaccgggcgtcgagagttgctgaactggggtcagggaacacttgttaccgtgtccagc

SEQ ID NO: 713 - DNA, 324 bp, synthetic construct
  source 1..324: mol_type = other DNA
gagattgtgatgactcagagccctgctacactgagtgtatctcctggggaacgggccaccctcagttgtagagcctctcagagcgtcaactctagatttctagcctggtatcagcaaaagccgggccaggcaccaaggttgctcatctacggcgcatcaactagggcaaccgggattcctgcccgcttctcaggcagcgggtcagggactgagtttacacttacgatcagtagcttacagagcgaggactttgccgtctactattgcatgcagggaactcactggccatacaccttcggccaagggacaaaagtggaaatcaag

SEQ ID NO: 714 - DNA, 351 bp, synthetic construct
  source 1..351: mol_type = other DNA
caggtccagctagttcagtctggggcagaagtcaagaaaccgggtagctcagtgaaggtgtcctgcaaagcaagcggctacactttcacctcatatgatattaattgggtgcgacaggcaccaggccaagggctggaatggatgggcggcatcattcccatcttcgggacagccaattacgctcagaagtttcagggacgggttacgattactgccgatgaaagcacctctactgcctatatggagttaagctctctgcgcagcgaggacaccgctgtgtactattgtgccactacaccaggcgatgctttcgacatatggggtcagggaacaatggttacagtctcatct

SEQ ID NO: 715 - DNA, 339 bp, synthetic construct
  source 1..339: mol_type = other DNA
gacattgtaatgacccagtctcccgatagccttgccgtgtccttgggcgaaagggcaaccataaattgcaagtcctcccagtccgtcttgtactcgagtaacaacaaaaactatctcgcgtggtatcagcaaaagcccgggcaacctcctaaactgctgatctactgggctagtaccagagagagcggcgtgccagaccgtttttctgggagtggtagcgggactgatttcacccttacgataagtagtctccaggccgaggacgtagcggtgtactattgtcaacagtacagtgacacacctctgacctttgggcaaggcacaaaagtggaaatcaag

SEQ ID NO: 716 - DNA, 348 bp, synthetic construct
  source 1..348: mol_type = other DNA
gaagtgcaactgctcgaatctggcggtgggctggtcaaacctggtggatctcttcggctgtcatgcgcagcctccgggtttaccttctcctcctcctggatgcattgggtgcgacaggcacccgggaaaggcctggagtgggtgtcagccatcgggactgccggtgatacctattaccctggctcggtgaaagggaggttcaccattagccgggatgactccaagaatacgctgtacttgcagatgaactcactcaagactgaggacacggctgtctattactgtgccagagtgcgactcggccactttgacctgtggggacgcgggacacttgtaacagtcagctca

SEQ ID NO: 717 - DNA, 321 bp, synthetic construct
  source 1..321: mol_type = other DNA
gacatccagatgactcagtctccgagcagcttgagtgcttctgttggggatcgcgttaccattacatgcagggcctcccagtcaatctctcgttacttaaattggtatcagcaaaaacccggcaaggcacccaagctgctgatttacgcggcgagcagtctccaaagcggagtgccatccagattcagcgggagcgggtcgggcaccgattttacccttacaataagtagtttgcagccagaggacttcgctacatactattgtcaacagtcctatagcaacccacctacttttggccagggaactaagctagaaatcaag

SEQ ID NO: 718 - DNA, 357 bp, synthetic construct
  source 1..357: mol_type = other DNA
gaagttcaactgctcgagtccggcggtgggcttgttcagcacggcggctctttgcggctgtcctgtgctgcgagcggatttgccttctcctcctacgtcctgcattgggttcggcaggcacctgggaagggcctggagtgggtgtccagtatcagttccagtagcagctacatctactacgccgactccgtgaaagggcgattcaccatctcacgcgacaattcaaaaaacacactgtacttgcagatgaacagccttagggccgaggatactgctgtgtactattgcgctcgtggggatcgctatcccggcctgcccaattattggggtcagggaacattagtaaccgtgtctagt

SEQ ID NO: 719 - DNA, 321 bp, synthetic construct
  source 1..321: mol_type = other DNA
gacattcagatgacccagtctccaagtagcctaagtgcaagcgtcggcgacagagtaacaattacatgcagagcttcgcaagggatctcaagttggctcgcctggtaccagcagaaacctgggaaagcacctaagcttctcatataccaggcctcaaacaaggatactggggtgccatctaggttttctggctctggctcgggcacggacttcaccctcacaataagcagcttacagcccgaagattttgccacgtattattgtcaacagtcatataggattccgtggactttcgggcagggaaccaaggtggaaatcaag

SEQ ID NO: 720 - DNA, 360 bp, synthetic construct
  source 1..360: mol_type = other DNA
gaggtccagcttctggaatcaggcggcgggctggtccagcctggtggttccttacggttgtcctgcgctgcctccgggtttgcgtttagtggcacttggatgcagtgggtgcggcaggcaccgggcaagggcctggagtgggtttctgacatttccgggtccagtagggacaccaactacgctgacagtgtaaagggacgattcacaataagcagggacaactctaaaaatacgctgtacctccagatgaactctctgcgcgctgaagatacagccgtgtactattgtgcaaaagatcactgggattcatatgggtatctggactattggggacaagggactttggtgacagtgtctagt

SEQ ID NO: 721 - DNA, 321 bp, synthetic construct
  source 1..321: mol_type = other DNA
gacattcagatgactcagagtccaagcagcctgagcgccagcgttggcgatagagtgaccattacctgcagagcgtcacaatccatctcgggttggctggcctggtaccagcagaagcctgggaaagcacccaagctcctcatctacgcagcttcgaccctacgtgatggggtcccatctcgctttagcgggagtggctctggcactgatttcacgctcacaataagcagccttcagcccgaggacttcgccacctactattgtcaacaggccaattcctttcccttaaccttcggacaagggacaaaagtggaaatcaag

SEQ ID NO: 722 - DNA, 354 bp, synthetic construct
  source 1..354: mol_type = other DNA
gaagtccaactgctcgagagtggcggcgggcttgttcagcctggcggttctttgcggctgtcatgcgccgcgagcggcttcatgtttgactattacgccatgcattgggttcgacaggctcccgggaagggcctagagtgggtgtccttgatctcctatgatgggaggaacaagtactacgccgactcagtgaagggccgcttcacaatcagccgggataattccaaaaacaccctgtacctccagatgaacagccttagagccgaagataccgctgtctactattgtgcaaggcccgggagctattctagatttcagcactggggtcagggaacattagtgacagtgtcgtct

SEQ ID NO: 723 - DNA, 321 bp, synthetic construct
  source 1..321: mol_type = other DNA
gacattcagatgacccaatcgccaagttccctgagtgcttcagtcggcgaccgcgtaactattacctgtagagccagtcaagggatttctaataacctgaattggtatcaacagaagcccgggaaagctcctaaactgctgatatacgcggcatcctccctccagtcaggcgtgcctagtcgttttagcgggtctggctcaggcactgactttacactcacgatcagctccttacagccggaggatttcgccacttattactgccagcaggcaaataacttcccaataacgttcgggcagggaaccaaagtggaaatcaag

SEQ ID NO: 724 - DNA, 363 bp, synthetic construct
  source 1..363: mol_type = other DNA
gaagtgcagctgctcgagtcgggcggcgggctggtgcaaccaggagggtcattacggttgtcatgcgctgcctctgggtttacgttcggagcctacgtgatgcattgggtccggcaggcacctgggaaaggcctggagtgggtgtcctccattagtggcggcagcacttactacgccgactccgttaaagggagattcacaataagcagggacaactcaaagaacacgctgtacctccagatgaatagccttcgcgcagaagataccgccgtgtactattgcgccaggcacccagtccgtggcgtgattggggcaggctggttcgatccttggggtcagggtacacttgtaacagtgtccagt

SEQ ID NO: 725 - DNA, 321 bp, synthetic construct
  source 1..321: mol_type = other DNA
gacatacagatgactcagtctccaagctccttgtcagcttctgttggggaccgagttaccatcacttgtagggcctcacaaaatatctcccgctggctggcttggtatcagcaaaagccgggcaaagctcccaagctgctgatctacgcggcgagtagcctccagtcgggagtacccagcagatttagcggctccgggtctgggaccgatttcaccctaacaatcagtagcctccagcccgaggattttgccacttattattgtcaacaggcaattagcttccctttaacctttggcggtggcaccaaggtcgaaatcaag

SEQ ID NO: 726 - DNA, 363 bp, synthetic construct
  source 1..363: mol_type = other DNA
gaggttcagcttctcgagtcgggcggagggctagttcagcctggcgggtctttgcgtctgagctgtgccgccagcggctttaccttctcctcatacgccatgcattgggttcgacaggctcctgggaagggcctggagtggctcgccgtaatctccttcgacgggtctatcagacactatgcggactccgtgaaaggcaggttcaccatttctcgggacaattccaagaacacgctgtacttgcagatgaacagtctgcgggcagaagataccgccgtgtactattgcgccaaaccaaaggcctccagcgggccgcgcttgatagattactggggacaagggactcttgtgaccgtcagctca

SEQ ID NO: 727 - DNA, 321 bp, synthetic construct
  source 1..321: mol_type = other DNA
gacattcagatgacacagagtccatcttcactgtcagcttcggtcggcgacagagtgactattacatgtcgagcatcccaaggaatctccaattctctggcgtggtatcaacagaaacccggcaaagctcccaagctgctgatatacagcgcagtgaacctccagagcggagtgccctcacgcttttccggaagtggctctgggactgattttacacttacgataagtagcctccagcctgaagatttcgctacatattactgccaacaggcaaatagctttccattaactttcggcggcggaacaaaagtcgaaatcaag

SEQ ID NO: 728 - DNA, 369 bp, synthetic construct
  source 1..369: mol_type = other DNA
gaagtgcagctgctcgaaagtggaggcgggctggttcaacccggagggagcttgcggctctcatgcgctgcgagcggttttaccttctcctcctatgccatgcattgggttcggcaggcgcccgggaaaggcctggagtgggtgtcctccatctcaagtagctctacctacattcactacgccgatagcgtcaagggtagattcacgatctcccgcgacaacagcaaaaataccctgtacctccagatgaactccttacgagccgaggacactgctgtgtactattgtgcaagggtggggaggtattacggcagcggctcatcactggtagactattggggacaagggacacttgtcaccgtgtctagc

SEQ ID NO: 729 - DNA, 321 bp, synthetic construct
  source 1..321: mol_type = other DNA
gacattcagatgactcagtcgccatcatcgttgtccgctagtgtcggcgatagagtgactattacctgccgtgcctctcagagcgtgtcctcctggctggcatggtatcaacagaaacctgggaaggcaccgaagctgctcatctacgatgcctctagtctacagtctggcgtaccctcccgctttagcggctctgggtctggcaccgatttcactcttacaataagcagtttacagcctgaggacttcgccacatattactgtcaacaggctaaaagttttccacctacgtttggccaagggacaaaggtcgaaatcaag

SEQ ID NO: 730 - DNA, 378 bp, synthetic construct
  source 1..378: mol_type = other DNA
gaagtgcagttactcgagagcggcggcggattggtccagcctggcggtagcctgcggttgtcatgcgctgcgagtgggttcaccttctcctcatacgccatgtcgtgggtccggcaggcacccggcaaaggcctggagtgggtgtcctccatcagtagtgcttctagctacaagtattatgccgactccgtgaaagggcgatttaccatctcccgagacaattccaagaatacgctgtacctccagatgaactctcttcgcgctgaagataccgccgtgtactattgtgcaagggatatatactccagcggatggcgcggctactactactatgggatggatgtttggggacaagggaccacggtgacagtgtcaagt

SEQ ID NO: 731 - DNA, 321 bp, synthetic construct
  source 1..321: mol_type = other DNA
gacattcagatgacccagtctccatcttcactgtcagctagtgttggggatagagtcactataacttgcagggcctctcaagggattaggaacgaccttaactggtatcagcaaaagcccgggaaagcaccgaagctcctgatttacgcagcgacaagactgcaaagcggcgtacctagcagattcagcgggtcgggttccgggactgattttaccctcacaatcagctccctacagccagaggacttcgccacttattactgtcaacaggcccatagttttccctatagctttgggcagggaacacgtctggaaatcaag

SEQ ID NO: 732 - DNA, 366 bp, synthetic construct
  source 1..366: mol_type = other DNA
gaagtccaactcctggagagtggcggcgggctggtacagcccggcggatctttgcggctgagttgtgctgcaagcgggtttaccttctcctcatatgccatgtcatgggttcggcaggcacctgggaagggcctagagtgggtctcagccattagcgggtcgggtggcaatgcgtactatgcggacagcgtgaagggccgtttcaccatcagccgcgacaatgccaaaaacagtctctacttgcagatgaactccctgagggctgaggacactgcggtgtactattgcgccaaaaatagttggggctcttataggccaagagcctttgatatttggggacaagggacaatggtgactgtgtcctcc

SEQ ID NO: 733 - DNA, 339 bp, synthetic construct
  source 1..339: mol_type = other DNA
gacattgtgatgacacaaagcccagattctcttgctgtcagcctcggagagagagccacgatcaattgcaaatcctcccagtctgtgctgtactcatctaacaacaagaactatctcgcatggtaccagcagaaaccgggccagcctcccaaactgctgatctactgggcctctacccgagcatcgggcgtgcctgaccgctttagcgggtctgggtctgggaccgatttcactcttacaataagttccttacaagcagaagatgtcgccgtttattactgccagcagtatctgagcttaccctacaccttcggccagggtacaaaagttgaaatcaag

SEQ ID NO: 734 - DNA, 363 bp, synthetic construct
  source 1..363: mol_type = other DNA
caggttcagcttgtccagtctggtgccgaggtgaaaaagcctggcgcgtcagttaaagtgtcctgcaaggccagcgggaatatcttcaccgcacagtacatgcattgggttcggcaggcaccaggccagggtttggaatggatgggctggatgaatccgaataccgtctataccgggagtgcccaaaagttccagggccgagtcactatgacaagagacaccagcacatccactgtctacatggagctaagctctctgcgctcagaagataccgctgtgtactattgcgccagggattgggtcggtgatgggtataatagctttgattattggggacaaggcacattagtaactgtgtccagt

SEQ ID NO: 735 - DNA, 339 bp, synthetic construct
  source 1..339: mol_type = other DNA
gacattgttatgacccagtcaccagattcgctggcagtgtccctgggcgaaagggctactattaactgtaaaagtagccagtccgtgctctatagcagtaacaacaaaaactacttggcctggtaccaacagaagcccgggcagcctcccaaactgctgatctactgggcctctacaagagagtctggggtgcccgaccgtttttctggctctgggtccggcactgacttcacgcttacgataagcagcctccaggctgaggacgtagctgtgtactattgtcaacagtactataccacacctttcacgtttggcccagggacaaaggtggacatcaag

SEQ ID NO: 736 - DNA, 366 bp, synthetic construct
  source 1..366: mol_type = other DNA
gaagttcagctgctcgaaagcggaggcgggctggtccagcctggcgggagtttacggttgtcctgtgccgcgtctggttttaccttctcctcatacggcatgaattgggtgcgccaggcacccgggaaaggcctggagtgggtcagcgctattagtggttctggtggcaggacttactacgctgattcagttaaagggagattcaccatttcacgagacaacgctaaaaacagcctgtacttgcagatgaactcccttagggccgaggacaccgcagtgtattactgcgctaagggcacatattattcctcgccaaagtattcgtttgactattggggacaaggcactctcgtaaccgtgtcctcc

SEQ ID NO: 737 - DNA, 321 bp, synthetic construct
  source 1..321: mol_type = other DNA
gacatccagatgacgcagagtcctagctccctgtcagcctctgtcggcgatagagtgacaattacttgccgggcgagtcaagatatcaagaatttcctcgcatggtatcagcaaaagcccgggaaagcaccgaaactgctgatctacgccgccagcagcctccagagcggcgtgccatctcgtttttcaggctctgggtctgggacagatttcacacttaccataagtagcttacagcccgaggactttgccacctattactgtcaacagtcttacagcactccttggacgttcgggcagggaacaaagctagaaatcaag

SEQ ID NO: 738 - DNA, 393 bp, synthetic construct
  source 1..393: mol_type = other DNA
gaagttcagcttctcgagagcggcggcgggctggtgcaaccgggaggttctttgcggctgtcatgtgccgcgagcgggctgaccttcagctcatatcagatgtcatccgtcagtcaggcacctggcaaaggcctggagtgggtgtcctacataagcagtgcagccaatactgtgtactatgcggacagcgttaagggccgattcacgatcagtcgggacaactccaagaacactctgtacctccagatgaactccttacgcgcagaggatactgctgtgtactattgcgccagggaagatgagtctagatcgccttattgtagcggcgggtcttgctaccgtgctgaatactttcaacattggggtcagggtacacttgtaaccgtgtcctcc

SEQ ID NO: 739 - DNA, 321 bp, synthetic construct
  source 1..321: mol_type = other DNA
gacattcagatgacacagagcccaagctcactgtcagcttctgtaggcgaccgcgtcaccatcacttgcagagcctcgcagggaatttctaattacctagcatggtatcaacagaagccagggaaagctcctaagctgctgatctacgcagcaagtagtctccagagtggagtgccgtccaggtttagcggcagcggttcagggacggacttcaccctcaccataagttccttacagcccgaggatttcgccacctattattgtcaacagagctactctacacccttgacatttgggccagggacaaaagtcgatattaag

SEQ ID NO: 740 - DNA, 711 bp, synthetic construct
  source 1..711: mol_type = other DNA
caagtgcagctcgttcagtctggggcggaggttaaaaaaccgggctcatctgtgaaagtgtcttgcaaggcctccggctataccttcaccgattactacatgcattgggtccggcaggcacccgggcagggacttgagtggatgggcgggattatcccaatctttgggactgcaaattatgctcagaaattccaagggcgcgtaactattaccgccgacgaaagcacaagcaccgcgtacatggagctatcgagcctccgtagcgaggacaccgctgtgtactattgcgccaaggaaggcgctaatggctactggggtcagggaacattggtaacagtgtccagtggaggcggcggttcaggaggtggtggaagtggaggaggaggttccgacattcagatgactcagtcgccaagttcactgtcagcttccgtcggcgatagagtcactattacttgtcaagcatcccaggatatatccaactatttgaactggtaccagcagaagcccggcaaggcacccaagctgctgatatacaaggcctcctctctggaatcaggcgtgcctagccgattttctgggtctgggagtggcacagatttcacgctgacaatcagctccttacagcctgaggacttcgccacctattattgtcaacaaagcagcaggatccctccaacctttgggcagggaacgaaagttgaaatcaag

SEQ ID NO: 741 - DNA, 747 bp, synthetic construct
  source 1..747: mol_type = other DNA
gaagtgcagctcctagagtctggcggcgggctggttcaacctggtgggtcattgcggctgagctgcgctgccagtgggttcaccttttcagattactacatgtcatgggtccggcaggctcccgggaagggccttgagtgggtgtcctacatctcaggttctggcgatgcaatctactatgctgactctgtaaagggccgcttcaccattagccgcgacaattcaaaaaatactctgtacctccagatgaacagccttcgagccgaagatactgccgtgtactattgtgcaagggataggtctgattgcggtggggacgacagattcctgtgtgacggttattttgacctgtggggaagaggcacgcttgtgtccttgtctggaggaggcggatcaggaggcggtggaagtggcggcggaggaagcgacatacagatgacacagagcccgagttccctgtccgctagtgttggggacagagtcaccattacatgcagggcctcgcagagcactaacaactatgtgaattggtatcagcaaaaacccggcaaagcaccaaaactgctgatatacgcggcctcctccctccaatctggtgtgccttctcgttttagcgggagtgggtcgggcactgatttcacgctcacaatcagttccttgcagcccgaggactttgccacctactattgtcaacagagctatagcattcctttaaccttcggaccagggacaaaggtcgatatcaag

SEQ ID NO: 742 - DNA, 762 bp, synthetic construct
  source 1..762: mol_type = other DNA
caggttcagctcgtccagtctggggcagaagtgaaaaaacctggaagcagcgtaaaagtctcctgcaaggcctccggatatacgttcacctcttatgacattaactgggtgcggcaggcacccggccagggccttgagtggatgggcgggattatcccaatttttgggaccacaaagtttgctcagaagtttcagggccgcgtgaccataaccgctgatgaaagtacaagcacagcttacatggagctctcgagtttgaggagcgaggatactgccgtgtactattgtgccagagattggtattcctcgagctggtataacggagatcgtggggattggttcgacccatggggtcagggaacacttgtaactgtgtcctccggcggaggaggatctggtggcggtggaagtggcggtggaggctctgacatagttatgactcagtcaccactgtccctccctgtgactcctggcgagcccgcctcaatctcctgtaggagttcagggtccctgctgcattctaatggctacaattacctggactggtacctgcaaaagcccgggcaatcaccgcagctattgatctacgcggcaagtagcttacagagcggcgtgcctgaccgattctctgggtcagggagcggtactgatttcaccctgaagatctctagagttgaagccgaggacgtcggtgtctactattgcatgcaagggacccactggcccggcacgtttggccaagggacaaaagtggaaatcaag

SEQ ID NO: 743 - DNA, 747 bp, synthetic construct
  source 1..747: mol_type = other DNA
caagtgcagctcgtccagagtggtgccgaagtgaaaaaacctggggcatccgtaaaggtgtcctgcaaggcctcaggctattttttcactacatactacttacattgggttcggcaggctcccgggcagggcctggaatggatgggcgtcataaatccgaatagtcgcctgactagctacgcagaatcctttcagggaagggtcacaatgactagagataccagcacatctaccgtctatatggagctgagcagtctgcgtagcgaggacaccgctgtgtactattgtgagagagaaatgttcccatcgagctatgggattgatgtgtggggtcagggaaccacggtgacagtttcaagcggaggaggagggtctggttccggaggaggtggatctggcggcggtggatcagacattgttatgacacaatcaccattgagcctcccagtgactccaggcgagcccgcctccatctcgtgtcgaagttcccagtcccttctgcacagcaacggctataactacttagactggtacttgcagaagcccggccagagtcctcagctcctaatctacgcagcgagcacgctccagtcaggcgtgcccgataggttttctggcagcgggtctgggaccgatttcacgctgaagatttctcgggttgaagctgaggacgtgggcgtctactattgcatgcaagggacccactggcctcctaccttcggccaagggacaaaacttgagatcaag

SEQ ID NO: 744 - DNA, 738 bp, synthetic construct
  source 1..738: mol_type = other DNA
caagtgcaactggttcagtctggggcggaagtcaagaagccaggctctagcgtaaaagtctcgtgcaaagcctccgggtacacttttacgagctattacatgcattgggtgcggcaggctcccgggcagggcctggaatggatgggtcggatcattcctatcctgggcgccaccgattatgcacagaaattccaagggcgcgtaactataactgccgacgagagcacatcaaccgcctacatggagctcagctccctgcgatccgaggacaccgctgtgtactattgcgccagggctggctattcctccatcgccgcgcgcccggctttttggggtcagggaactcttgttaccgtgtctagtggaggaggcgggtccggttcaggtggaggcggatcaggcggaggaggatctgagattgttatgacacagtcgccagcaaccctgagtgtcagcccgggcgagagggcaaccctcagttgtagagcttctcagagcgtgtcctccaacctagcatggtatcaacagaagcccggccaggcacccaggttgctcatctacggcgcctcaacaagagccaccgggattcctgcccgtttctctgggagcgggagcgggacagagtttacgcttacaataagtagtttacagtcagaagatttcgctgtgtactattgtcaacagtactactctcctttcccattgacttttggtggcggcacaaaggtggaaatcaag

SEQ ID NO: 745 - DNA, 768 bp, synthetic construct
  source 1..768: mol_type = other DNA
caagtgcagctcgtccagtctggagccgaagtgaaaaaacctggggcgtctgtaaaagtgtcctgcaaggcctccggctatactttcacgagctattacatgcattgggtgcggcaggcaccaggacaagggttggagtggctcgggataatcaacccatcagattacaccacaagctacgcgcagaagtttcagggccgcgtcaccatgaccagggatacttctacaagcaccgtctacatggaactctcgagtctaagaagtgaggatactgctgtgtattactgcgcccgagtggcctcttcatcctggtatccaggcgacgagaattggtattttgacctgtggggcagaggcacacttgtcaccgttagctcaggcggtggcgggagtggatcaggcggaggtggtagtggaggcggtggatcggacattgtcatgactcagtctcccgatagtcttgctgtgtccctgggagaaagggcaacaattaattgtaagtcctcccagtctgtgctgtactccagcaacaacaaaaattacttggcatggtatcagcaaaagcccggtcagccgcccaaactgctgatctactgggcttcaacccgggaaagcggcgtgcctgatcgtttcagcgggagcgggtctgggacagactttacactgaccatatccagcttacaggctgaggacgttgccatctactattgtcaacaatactatgccattccttggactttcgggcagggaacgaaggttgaaatcaag

SEQ ID NO: 746 - DNA, 723 bp, synthetic construct
  source 1..723: mol_type = other DNA
caggtccagcttgtccagtccggcgccgaagtcaaaaaacccggcgcgagtgtcaaagtgtcctgcaaggcctccggctatactttttcccggtacttcatgcattgggtgcggcaggcaccaggccaagggttggagtgggttggctggattaatcccaactccgggaataccggctatgcccaaaagtttcagggccgcgtaaccatgactcgagatacatctacatccactgtctacatggagctgtctagcctgcgcagcgaagacaccgcagtgtactattgcgctagggttgttaccggtggcagactggatgtgtggggacaaggcacaaccgtgacagtgtcaagcggaggtggaggatcaggaggaggcgggagtggtggaggaggttcagaaattgtgatgactcagagtcctgctactctgagtgtgtctcctggtgagagggcaaccctcagttgtagagcttcgcagagagtatctaacaactatctcgcatggtatcagcaaaagcccgggcaggctcctaggctgcttatctacggcgcgtcaacccgggcctctggcattccggcccgtttttctgggagcggatcagggactgagttcacactaacaatatccagcttacagagcgaggacttcgccgtgtactattgtcaacagtacgggagcacaccatacaccttcggccaagggacgaaggttgaaatcaag

SEQ ID NO: 747 - DNA, 729 bp, synthetic construct
  source 1..729: mol_type = other DNA
caagtacagttggtccagagcggcgcagaagtcaagaagcctggggcgtcagtgaaagtgtcctgcaaagcctccgggtatcggttcacaagccagtacatgcattgggtccggcaggcgccaggccagggtttggagtggatggggataattaatcctagcggcggtagtacgagttacgcgcagaagttccagggccgcgttaccatgactcgtgacacctctaccagcaccgtctacatggaactctcctccctgaggagcgaggataccgccgtgtattactgtgctagaggcaggatcgctgtggcaggccacccactcggctactggggtcaagggactcttgtaacagtgtccagtggaggaggaggaagcggcggtggcggtagtggcggtggagggtcagacattcagatgactcagtcgccctcttcactgtcagcttcggttggggatagagttactattacatgccgagcctctcagagtatctcctcctggctggcctggtatcagcaaaagccgggcaaagcacccaagctgctgatctacggagccagttccctacagagcggagtgccctctcgcttcagcgggagtggctctgggaccgacttcacacttacaataagcagtttacagcccgaagattttgcaacgtattattgtcaacaagctaactcatttccacctacctttggcggaggaacaaaagtggagatcaag

SEQ ID NO: 748 - DNA, 726 bp, synthetic construct
  source 1..726: mol_type = other DNA
caggtccaactggtccagtctggcgccgaagtgaaaaaacctggagcgtccgtgaaggtgtcctgcaaggcctccggctacaccttcacccgttattacatgcattgggttcgccaggcacccgggcaagggctggaatggatggggtggattaatccgaactccggcggtacaaattatgctcagaaatttcagggaagggtgacgatgactcgggatactagcacaagtacagtttacatggagctctcgagcctacgatcagaggacaccgccgtgtactattgtgctagaggcggctcatggggcagcgggccactcggctattggggacaagggacgcttgtcactgtatcctccggaggcggtggatctggaggaggcggtagtggaggcggagggtcagacattcagatgacacagagtcccagttccttgtcggcttcagtcggtgatcgggtgactataacctgtcaggcctcccaggatatttctaggttcttgcattggtatcagcaaaagcctgggaaagcacccaagctgctgatctacggtgcaagcaacctgaaatctggggtgccatctagattcagcggcagcgggagcgggaccgactttacacttaccatctcaagtttacaaccagaggacttcgccacttattactgccagcagagctactctacacctcccacctttggcggtggcaccaaggttgaaatcaag

SEQ ID NO: 749 - DNA, 729 bp, synthetic construct
  source 1..729: mol_type = other DNA
caagtgcagcttgttcagtctggagccgaggttaaaaagcccggcgcgtccgttaaagtgtcctgcaaagcctctggctacaccttcacgagctactacatgcattgggtccggcaggcaccgggccaagggttggagtggatggggattattaatccatctggtgccgggaccacatatgggcacaactttcagggaagagtcacaatgactcgagacacctcgacaagcaccgtctacatggaactctctagcctgcgctcagaggacacggctgtgtactattgtgctcgcggccctagggataccgcaatggtgcggttcgattattggggtcagggaacacttgtaacagtgtccagtggaggcggagggtcaggtggcggaggttcaggcggaggaggcagtgaaattgtgatgactcagtctcctgctactctgagtgtatcacctggggaaagggcaactctgagttgtagagcctcgcagagcgtgtcctcctatctggcgtggtaccagcagaagcccgggcaggcaccaaggctattgatctacggagccagcactagagccaccgggatacccgcccgtttttctggcagcgggtcaggcactgagttcaccttaaccatctcctccctgcaaagtgaggacttcgctgtctattactgccagcaatatggtagcagcccaggcacgtttggccagggtacaaagctcgaaatcaag

SEQ ID NO: 750 - DNA, 714 bp, synthetic construct
  source 1..714: mol_type = other DNA
caggtccagcttgtccagtctggggcggaagttaaaaagcctggggctagtgtaaaggtgtcctgcaaggcctccggcggcacatttagcaattacgcaatcagttgggtgcggcaggctccaggtcaagggttggagtgggtgggccggattaatcccaactccggcggcactaattatgctcagaagtttcaagggcgcgttaccatgaccagggataccagcactagcaccgtctacatggaactaagctccctgaggtctgaggacactgctgtctactattgtgccagaggacgatactcctcttcgtcctggggtcagggaaccctcgtgaccgtatcatctggcggcggaggctcaggaggaggtggaagtggtggaggagggtcagacattcagatgacacagagtccctcatcactgtcagcctccgttggtgatagagtgacaattacgtgccgtgcctctcagtccatcaacaactacttaaactggtatcagcaaaaaccgggcaaagcaccaaaactgctgatctacgcggcaagcagtctccagtctggcgtgcctagccgctttagcgggtctggtagcggcactgatttcacactgacaataagtagccttcagcccgaggacttcgccacctattactgtcaacagtcgtattccacaaaatggactttcgggcaagggacgaaagtggaaatcaag

SEQ ID NO: 751 - DNA, 726 bp, synthetic construct
  source 1..726: mol_type = other DNA
caggttcagcttgtccagtctggggcagaagtcaagaagcctggcgcctccgtgaaagtgtcgtgcaaggcctccggctataccttctcaaactactacatccactgggttcgacaggcgcccgggcagggcttggaatggatgggctggattaatccgaactccggtgatacaaattatgcacaaaaattccaagggcgggtaacaatgacccgggataccagtacatctacggtctacatggagctaagcagcctgcgcagtgaagataccgctgtgtactattgcgctagaggcatgacctggaggacctctgctgccacatactggggtcagggaacacttgttactgtgtcctccggcggaggaggatcaggcggtggcggaagtggaggtggaggttcagacattcagatgactcaaagcccaagctcactgtcagctagtgtgggcgatagagtgacgattacatgtagggcctcccaagggatctcgcgctggctcgcgtggtaccagcagaagcctgggaaggcacccaaactgctgatctacggcgccagcaacctccagactggggtgccctctcgtttttctggatctggtagcggcactgacttcaccctgacaatatccagcttacagcccgaggactttgccacctattattgtcaacagagttatagcactcctccaacttttgggccagggacgaaagtcgacatcaag

SEQ ID NO: 752 - DNA, 732 bp, synthetic construct
  source 1..732: mol_type = other DNA
caggttcagttggttcagtctggggcagaagttaaaaagccaggcgcgagcgtgaaagtgtcttgtaaggcctccggctataccttcaccaattactacatgcattgggtccggcaggctcctgggcaagggttggagtggatgggttggataagcgcctacaacggcaacaccaattacgctcagaaactgcaagggcgcgtgacgatgacaagagacacttcaacttcaaccgtctatatggaactgagtagcctccgatctgaggacaccgccgtgtactattgtgcaacagccagcggttggggacacagtaactccgcgggctactggggtcaagggactcttgtgacagtctcttcaggtggcggcggatctggaggtggagggtcaggcggaggcggtagtgagattgtcatgacacagtctcccgctactctgagtgtgtcgcccggcgaaagggcaaccctgagttgcagagcatcccagtcggtgaacgggaattatctcgcctggtatcagcaaaaaccgggccaggctcccaggctgttaatctacggagtctcctcccgggccagcgggattcctgctcgtttcagcggctccggatcaggcactgagttcacactaaccataagtagccttcagtctgaagattttgccgtgtactattgtcaacagtatggaagctctccatacacgtttgggcagggaacaaaggttgagatcaag

SEQ ID NO: 753 - DNA, 729 bp, synthetic construct
  source 1..729: mol_type = other DNA
gaagtccaactgctcgagagcggcggtgggctggttcagccaggcggtagtctccggctgtcctgtgctgcgagtgggttcaccttttccaatcactatatgagctgggtgcggcaggctccgggaaaaggcctggagtgggtatcagccatctccgggtctggcggcagcacttattacgccgatagcgttaagggtcgcttcaccattagccgggacaactccaagaacacactgtacttgcagatgaactcattacgcgctggggataccgccgtgtactattgcgcgagggaccgatacagatggggcagaggctattttcagcattggggacaagggactctagtaacagtgtcctcgggcggaggagggagtggaggtggtggatctggaggcggtggctctgacatccaaatgacacagtcaccttcatccttgtccgcctctgtcggcgatagagtgacgattacatgtagggcaagtcagaggattagcacttatctgaattggtaccagcagaagcccggaaaagcacccaaactgctgatctactccgcatcgaccctccaggctggggtgccatctcgttttagcgggtctggctcaggcaccgatttcacgcttacaataagtagcctccagcccgaggactttgccacttattactgccaacaggcctactctcttccttggaccttcgggcagggaactaagttagaaatcaag

SEQ ID NO: 754 - DNA, 729 bp, synthetic construct
  source 1..729: mol_type = other DNA
caggttcagctggtccagtcgggcgccgaagtgaagaagcctggggcgagtgttaaagtgtcctgcaaggcctctggctacactttcactcgttattacatgcattgggttcggcaggcacctgggcaagggctggaatggatggggtggattaacccgaactccggagtgaccaattttgctcagaagttccaagggcgcgtaactatgacacgggacaccagtacatcaaccgtctacatggagctgtccagcctaaggagcgaagacactgctgtgtactattgtgcgagggtcagaattggctggctccagtcacctccactgtactggggacaaggaacgcttgtgacagtatccagcggcggcggaggatctggtggtggtggatctggcggcggtggatcagacatacagatgacccagtcgccaagctccttgagtgcttccgtcggagatagagtgactataacctgccgagcctctcagtcaatcaatacctggctcgcctggtatcagcaaaagcccggcaaagctcccaaactgctgatctacgcagcaagcagtctccagagcggcgtgccctcacgcttttctgggtctgggagtggtacagatttcacccttacaattagcagcttgcagccagaggattttgccacgtattattgtcaacaggccatctcctttcccttaaccttcggcggcgggacaaaagtggagatcaag

SEQ ID NO: 755 - DNA, 723 bp, synthetic construct
  source 1..723: mol_type = other DNA
caggtccagctcgtacagtccggcgcggaggttaaaaagcctggtgcaagtgtaaaagtttcctgcaaggcctccggttacactttctcacggcactacatgcattgggtccggcaggcacccgggcagggcttggaatggatggggcgcattaatccgaactccggcggtactaattacgctcagaaatttcaagggcgagttaccatgacaagggatacctctacttccaccgtgtatatggaactgagtagccttaggagcgaggacaccgctgtgtactattgtgccagaagcatctacggcgattattggtttgatccttggggacaagggacacttgtcacagtgtctagtggaggcggagggtctggaggtggaggcagcggcggaggtggatctgacattcagatgacccagtctccatcatcactgtcagcttctgtgggcgatagagtgacaataacatgcagggcctcccagtcgatcaatcgctggctcgcgtggtatcaacagaagcccgggaaagcaccaaagctgctgatttacggcgccagcaacctacagagcggcgtgcctagtcgttttagcggttcagggtctggaaccgacttcacgttgacaataagcagtttacagcccgaggactttgccacctattattgtcaacaggctaactccttcccatacactttcgggcaaggcactaagctggaaatcaag

SEQ ID NO: 756 - DNA, 717 bp, synthetic construct
  source 1..717: mol_type = other DNA
caagtgcagcttgttcagtccggcgctgaagtgaaaaaacccggcgcatcagttaaagtgtcctgcaaggcctccggctatactttcacatcgtattacatccactgggtccggcaggctcctgggcagggactagagtggatggggtggatgagccctaatagcggcgataccggttacgcccaaaagtttcagggccgcgtaaccatgaccagggacacatctacatccaccgtctacatggagcttagctctttgcgatccgaagatacggctgtgtactattgcgcccggctcgtccgtggcgggtttgattactggggtcagggaacgctggtaacagtgtcaagtggtggcggaggatcaggcggaggcggatctggtggtggcggctctgacattcagatgacccagtctccaagcagcctgagtgcctcggttggggacagagtgactattacctgtcgcgctagtcagggaatctcctcctacctgaactggtatcaacagaagcccgggaaggcacccaaactcttgatttacgcggcgagtagactccaaagcggagtgccgagcaggttttccgggagcgggtctggcaccgatttcacactgacaataagtagtttacagccagaggacttcgcaacttactattgtcaacagtcttatagaagccctccaactttcgggcagggaactaagctggaaatcaag

SEQ ID NO: 757 - DNA, 750 bp, synthetic construct
  source 1..750: mol_type = other DNA
caggtccagctcgtacagagtggcgccgaagtcaagaagcctggagcttccgtcaaagtgtcctgcaaagccagcggctatactttcacgtcctcaggaattaattgggttcggcaggcacccgggcagggcttggagtggatggggtggattaatcccaactccggcggcgcaaaatatgcccaacgcttccagggacgggttactatgacccgagataccagcacctctactgtctacatggagctgagcagccttaggagtgaagataccgctgtgtactattgcgccagggcgagagggtattctggctcgaaaagagattttcagcattggggacaagggacattggttacagtctcatcaggaggaggcggttctggcggcggcgggagtggaggtggtggatctgacattgtgatgacacagagtccggacagccttgctgtgtctctcggtgaacgcgcgaccatcaactgcaagtcctcccagtcggtgctgtactcaagcaacaacaagaattacctggcctggtatcaacagaaaccgggccagcctccaaagctgctgatctactgggctagtaccagggagtctggggtgcctgatcgtttctccggtagcggctccgggacagacttcaccctaactataagcagtttacaagcagaggacgtggccgtatatcactgtcaacagtactacaatacaccatttacgtttggaccagggacaaaagtggacatcaag

SEQ ID NO: 758 - DNA, 735 bp, synthetic construct
  source 1..735: mol_type = other DNA
caagtgcagttggttcagtctggagccgaagtgaagaagcctggggcgagcgtcaaagtgtcctgcaaggcctccggctacacttttaaccggaaattcatgcattgggttcggcaggcacccggtcaagggctggaatggatgggctggatgaacccgaacaacggtgcaactaattatgcacagaagttccagggccgcgtgacaatgacacgagataccagcacttcaaccgtctacatggagctctcttccctaaggagcgaagataccgccgtctactattgtgctagaggaagaggctattatggttctggttcatactatggggactattggggacaagggacccttgtaacagtctcctctggaggaggcggatcaggcggtggcggaagcggtggaggaggctcagatattcagatgacccagtcgccaagttccttgtccgcttccgtaggcgaccgcgtgactataacttgcagggcctctcaaagtatctcgagatacctgaattggtaccagcagaagccagggaaagctccaaaactgctgatctacggagcgagcaatctccagagcggcgtgccgagtcgttttagcggcagcgggtctgggacagacttcacgctgacaataagtagcttacagcccgaggattttgctacgtattactgtcaacagagttactccacacctcccaccttcggccctgggacgaaagtggacatcaag

SEQ ID NO: 759 - DNA, 714 bp, synthetic construct
  source 1..714: mol_type = other DNA
caagtgcagctggtgcagagtggcgcggaggtcaaaaagcctggggcgtccgtgaaagtgtcctgcaaggcctccggatacaccttcacccgatattacatgcattgggttcggcaggcaccaggccaagggctcgaatggatggggtggatgaatcccaactccgggaatgcaggctatgctcagaaactgcaaggccgcgtgactatgactcgcgacacctccacctcaactgtctacatggagctaagtagcttgaggtctgaggacaccgctgtgtattactgtgccagaggctacaactggtttgatccatggggtcagggaacacttgtaacagtgtcaagtggaggaggtggaagtggcggcggaggctcaggtggtggcggaagcgacattcagatgacccagtcgccctcttcactgtccgcctcagttggggacagagtaaccattacctgtagggcctctcagaatatcgccacatacctgagctggtatcagcaaaagcctggcaaagctccaaagctgctgatctacggtgcaagcgccctccggtctggagtccctagccgtttttctgggtccgggagcgggacagatttcactctcacaatatctagcttacagccggaagatttcgctacttattactgccttcagcacaacacatatcccttgacatttggcggaggcacgaaggttgaaatcaag

SEQ ID NO: 760 - DNA, 717 bp, synthetic construct
  source 1..717: mol_type = other DNA
caggttcaactggtccagtcaggcgctgaagtgaagaagcctggcgcctctgtgaaagtgtcctgcaaagcctccggttatagtttctctggctactatctgcattgggttaggcaggcacctgggcagggcctggaatggatggggtggatgaatcccgattctgggaatactggctacgcgcaaaactttcagggacgggttacaatgacccgagatacttccacctcaaccgtctacatggaactctcctctctgcggagcgaggacaccgccgtgtactattgtgctcgcctgcaccgtggcgggcacgattactggggtcagggaacacttgtcactgtatcgagtggtggcggagggtccggaggtggaggctcgggtggaggtggatcagacattcagatgactcagagtccaagcagtttgagtgcttctgtgggcgacagagtaactattacatgcagggcctcccagtcaatctctcgctatctcaactggtatcagcaaaaacccggcaaggcaccgaagttactgatctacgcagcgagcacgctacagagcggagtgccatcaagatttagcggcagcgggtccgggaccgatttcacccttacgataagcagcttgcaacctgaggacttcgccacctactattgtcaacagtcttactccacacccgtgacatttgggcagggaacacggctcgagatcaag

SEQ ID NO: 761 - DNA, 729 bp, synthetic construct
  source 1..729: mol_type = other DNA
caggttcagctggtccagtctggcgccgaagttaaaaaacctggcgcgagcgtgaaagtgtcctgcaaggcctccggttacacattcacttcatattacatgcattgggtgcggcaggctcctgggcaagggttggagtggatggggcggattaatccgcactctggcgacgccgatttcgtcgataagtttcaagggcgcgtgactatgaccagggatactagcaccagcaccgtctacatggagctatcaagtttgcgctccgaagataccgcagtgtactattgcgccagggacagaagaggatatggcggcaatagccttgactattggggacaagggacacttgtaactgttagttctggcggtggaggaagcggaggaggcggttccggaggaggcggttcagacattcagatgactcagagtccaagttcactgtcagcttccgtgggtgacagagtgacgataacatgtagggccgggcagaacatcaagcgatacctcaactggtaccagcagaaacctgggaaggcacccaaactgctgatatatgcagcgagcagcctccagtctggggtaccctctcgtttcagcggctctgggtccggcaccgattttacgctcacaatcagttccctgcaaccagaggactttgctacatactattgtcaacagtcgtacagctcgcccttaaccttcggaggcggcaccaaagtcgaaatcaag

SEQ ID NO: 762 - DNA, 729 bp, synthetic construct
  source 1..729: mol_type = other DNA
caggttcagttggtacaatcaggagcagaagtgaaaaagcctggagcctcagtgaaggtgtcctgcaaagcctccggctatacattcacccggaattacctccattgggttcggcaggctcctggccagggcctggagtggatggggattattaatcccagtggcggcagcaccacttacgcccagaagttccaaggccgcgtaacaatgacccgagatacatcaacttccaccgtctacatggaactctccagcctgaggagcgaggacacggctgtgtactattgtgcccgcggcaggacatggttcagatcaggcatggatgtgtggggtcaagggaccaccgttacagtgtcctccggaggaggagggagcggtggcggaggaagtggtggtggaggatcagaaatcgtgatgactcagagtcccgccacactgagtgtcagcccgggcgagcgggcaacactgagttgcagagcctcccagtctgtcggcaactatctagcttggtatcagcaaaagcctgggcaggctccaaggctgcttatttacggcgcgagcactagagcaactgggataccagcgcgtttttctgggtctgggtctgggactgagtttacccttaccatcagctcgttacagtctgaggacttcgcagtgtactattgtcaacagtaccactctagcccaccatatacgtttgggcagggtacgaaagtcgaaatcaag

SEQ ID NO: 763 - DNA, 726 bp, synthetic construct
  source 1..726: mol_type = other DNA
caagtgcagctggtccagtcaggcgcggaagtcaaaaaatctggcgcgagcgttaaggtgtcctgcaaggcctccggttacacctttacgtcctattacatgcattgggtccggcaggcacctgggcagggcctggagtggatgggcgttataaatccctctggcggcactacaagctacgcccagaagtttcaagggcgggtgacaatgactcgagagacaagcactagcaccgtctacatggaactcagctcgctgcgctcagaagataccgccgtgtattactgcgcaagaggaagagggtggctgaggtctgctctcggctattggggtcagggtacacttgtaaccgtgtcctccggaggcggaggtagtggcggaggaggatctggcggaggagggtctgacattcagatgacccagtctccctcgtccttgtcagccagcgtgggtgatcgcgttaccattacctgtagggctagtcagagtatctcctcctggctcgcttggtatcagcaaaagcccggcaaagctcctaagctgctgatctacgcagcctcaactttgcagtccggcgtaccgagtcgtttttctgggagcgggagcgggaccgacttcacgctaactattagtagcttacagccagaggacttcgccacttattattgtcaacagtcatacaacacgccatacacattcgggcaaggcacaaaacttgagatcaag

SEQ ID NO: 764 - DNA, 750 bp, synthetic construct
  source 1..750: mol_type = other DNA
caggtccagttagtgcagtctggggcggaggtgaaaaagccaggagcgagcgtgaaagtgtcctgcaaagcctccggcgggcgattttcaacatacgccctgtcatgggttcggcaagcacccggccagggcctggagtggatggggtggattaacccgaactccggcggcacaaattacgcccagaaattccagggccgcgtaactatgactcgagacacctcaacttccaccgtctacatggagctaagctctctgaggagtgaagacacagcagtgtactattgcgccaagtccttgtggtggagtccaagccactactattactatgggatggatgtgtggggtcaaggcaccacagtcacagtttccagcggaggaggtggaagtggaggcggcggctctggaggaggaggcagtgaaatcgtgatgacacagagccctgctaccctgagtgttagccctggggaaagggctaccctctcgtgtagagcctcacaatctgtctcctccaattatctcgcctggtatcaacagaagcccgggcaggctcccaggttgcttatctacgggatttcaactagagcatcgggtattcccgctagattttctggttctggcagcgggaccgagtttacccttacgataagtagcctccagagcgaggatttcgcagtgtactattgtcaacagcgctctaactggccacctagcataacgttcgggcagggaactcgtctggaaatcaag

SEQ ID NO: 765 - DNA, 720 bp, synthetic construct
  source 1..720: mol_type = other DNA
gaggttcaactgctcgagtctggcggcgggcttgttcagcccggcggttctttgaggttgtcatgtgccgcgtctgggtttaccttctcctcctatgccatgcattgggtgcggcaggctcctggcaagggcctggagtgggtggctgtcatctggtacgacgggagcagcaaatactacgccgattccgtgaaaggccgcttcaccatttctcgagacaactcaaagaatacgctgtacctccagatgaactccctgcgcgcagaagataccgctgtgtactattgcgcgcgtggggaagtgcggagagggttccagcactggggtcagggaacacttgtcacagtgtcctccggaggaggcgggtcaggtggaggtggtagtggaggaggaggcagtgacattcagatgacacagtctcctagttcactgtcagccagcgtcggtgatagagttacaataacttgtagggcctcgcagaatgtaggaagctggctcgcatggtatcaacagaagccagggaaagctcccaagctgctgatctacgcagcaagcagcctccagagcggcgtaccatcgaggttttccggcagcggaagtggcaccgacttcaccttaactattagatctctacagccggaagattttgccacctattactgccaacagagttattccactcccatcacgtttgggcaaggcactcggttagagatcaag

SEQ ID NO: 766 - DNA, 726 bp, synthetic construct
  source 1..726: mol_type = other DNA
caggttcagctggtccagtctggcgccgaagtgaagaagcccggcgcatccgtcaaagtgtcgtgcaaggcctccggatatacattttcccgctactacatgcattgggttcggcaggctcctggccaagggttggaatggatggggtggatgaatccgaactccggcgatactggttatgcacagaaattccaagggagggtaacaatgacccgcgacaccagcacatctacggtctacatggaactctcctcactgcgaagcgaggatactgccgtgtattactgcgctaagggaagggagtggctgagatctcctttcgactattggggtcaagggactcttgtgaccgttagcagcggtggcggcggtagtggaggtggaggaagcggcggaggaggatcagacattcagatgacacagagcccttcttcactgtcagcttctgtgggcgatagagtgactattacctgtcgtgccagtcagtcaatcagcacttggctcgcttggtatcagcaaaagccagggaaagcgcccaaactgctgatctacgcagcgagtagtctccagtctggcgtgccctctcgcttttcgggctccgggtccggcaccgatttcacccttacaatttcaagcctacagccagaggactttgccacctattactgtcaacagttaagctcctacccattgacattcgggcaagggacaaaagtagagatcaag

SEQ ID NO: 767 - DNA, 723 bp, synthetic construct
  source 1..723: mol_type = other DNA
caggttcaactggtacagagcggcgccgaagtgaaaaaacccggcgcgagcgtgaaagtgtcctgcaaggcctccggctacaccttcactggatattacatgcattgggtccggcaggctcccgggcagggcctggagtggatgggatggatgaatccaaactccggaaataccggttacgcccagaaattccagggacgagttacaatgactcgtgatacatccactagcaccgtctacatggaactctcttctctacgctccgaggacaccgcagtgtactattgcgctaggctcagagcgaagggcggcggttttgactattggggtcagggtacacttgttactgtgtcaagtggcggaggagggtctggaggaggcggtagtggcggtggcggttctgacatccagatgacccagtcaccctcttcactgtcagccagcgtaggcgatagagtcactattacctgtagggcttcgcaagggattggaaactatttggcttggtatcaacagaagcccgggaaggcacctaaactgctgatctacgcagcaagcagcttagaaagcggagtgccgagtcgctttagcgggtccgggtctggcacagatttcacgcttacaataagtagtttgcagccagaggattttgccacgtactattgtcaacagggctaccggttcccacctacctttgggcctgggacaaaggtggacatcaag

SEQ ID NO: 768 - DNA, 750 bp, synthetic construct
  source 1..750: mol_type = other DNA
caggttcagctcgtacaatctggggcagaagtgaaaaagcccggcgccagcgttaaggtgtcctgcaaagccagcggctatacctttgcaaattacaacatccactgggtgcggcaagcacctgggcagggcctggagtggatggggtggatgaatccaaactccggcaataccggttacgctcagaaatttcaaggacgggtgaccatgaccagggacactagcacatcaactgtgtacatggagctaagcagtctgcgaagcgaagataccgctgtctactattgcgctcgcccacgatattcatctgggtggtatgggtggtattttgacctgtggggcagaggtacacttgtaacagtgtccagtggaggcggaggatccggtggtggcggaagtggaggcggtggttctgacattgtcatgacgcagagtccgttgtccctgcccgtgacacctggggaaccagcgtccatatcttgtagatcatcacagtccctcctccattcgaacggctacaactacttagattggtacttgcagaagcccgggcaatcgcctcagctcctgatctacttaggatctaatagggcctctggagtgccagatcgcttctcaggcagcgggagcggcacagatttcacgctgaaaattagtcgtgttgaggccgaagacgtaggcgtctactattgtatgcagagcacttattggcctccaactttcgggcagggaacaaagcttgagatcaag

SEQ ID NO: 769 - DNA, 729 bp, synthetic construct
  source 1..729: mol_type = other DNA
caggttcaactggtccagtcgggtgccgaggtgaaaaagcccggagcgtcagtgaaagtgtcctgcaaggcttctggctatacattcacgacttattacatgcattgggtgcggcaggcaccaggccaagggctagaatggatggggtggatgaatccgaactccggaaacacaggctacgcccagaagttccaagggcgggtaacaatgacccgagataccagcaccagcacggtctacatggagctctcctcactgcgctccgaagataccgcagtgtactattgtgcccgcgctaggacctggctgctgtctccatttgactattggggacaagggactcttgtgaccgttagtagcggtggaggaggatctggtggcggcgggtccggcggtggaggttcagaaattgttatgactcagagtcctgccaccctgagtgtaagtcctggggagagggcaactctgagttgtagagcctcccagtctgtgggcagatatttggcctggtaccagcagaagcctgggcaggctcccaggctcctcatctacggcgcgtccaccagagcaaccgggattccagctcgtttttcaggcagcggctctggcacagagttcacgttgactataagcagcttacagtctgaggacttcgccgtctattactgccagcactatgacagctcacccatgtacacttttgggcagggaacaaaacttgaaatcaag

SEQ ID NO: 770 - DNA, 723 bp, synthetic construct
  source 1..723: mol_type = other DNA
caggtccagctggtgcagtctggggcagaagtgaaaaaacccggaagcagcgtaaaggtgtcctgcaaggcctccggttacaccttccgcgggtctggcatctcctgggtccggcaagctcctgggcaagggttggagtggatggggattatctacccagctgacagcgagacacgctacagcccgagttttcagggccgagtgaccattaccgcggatgagtctacttcaactgcctatatggaactctctagtctccggtccgaggacactgcggtgtactattgtgcaagggagagttcctcctgggattatttcgattattggggacaaggaacacttgtaacagtgtcaagcggcggcggaggatctggaggcggaggttctggaggtggaggttcagaaatagttatgactcagtcgcctgccacactgagtgtctcgcccggcgaaagggctacactgtcttgcagagcctcccaaagcgttagatcatacctggcatggtatcagcaaaaacctggccaggctccaaggctgctcatatacggcgcctcaaccagagccaccggcattccagcccgtttttcagggagtggtagcgggaccgagttcactcttacgatcagctccctacagagcgaggacttcgcagtgtattactgtcaacagcacggcagtttgcccttaacctttggtcaagggacgaaagtcgaaatcaag

SEQ ID NO: 771 - DNA, 714 bp, synthetic construct
  source 1..714: mol_type = other DNA
caggttcagttggtgcagagcggcgcggaggtcaaaaagcctgggagcagcgtaaaagtgtcctgtaaggcctccggcggcacattctcctcatacgctatatcctgggtccggcaggctcctgggcagggcttggaatggatgggtcggattaatcctagcggcgggagcacttcttatgcccaaaagtttcaagggcgcgtgaccatgactcgagataccagtacaagcaccgtctacatggaacttagttcactgaggtctgaggacaccgcagtgtactattgtgctagaggccgatacagttcgtcgtcttggggtcagggtacgcttgtgactgtgtcctccggaggaggaggaagtggaggaggaggaagcggcggcggtggaagcgacattcagatgacccaatctccatcttcactgtcagcctcagttggggatagagtcaccattacatgcagggcctctcaaagcatctcaacctacctgaactggtatcagcaaaaacccgggaaagcacccaaactgctcatctacgctgcctcctccctccagcgcggcgtgccgagtcgtttctctgggtcagggagcggtacagactttacgctgactatctcctccctacagccagaggattttgcaacttattactgccagcagtcttatactacacccttaaccttcggcggcggcacaaaggttgaaatcaag

SEQ ID NO: 772 - DNA, 726 bp, synthetic construct
  source 1..726: mol_type = other DNA
caggtccagcttgtccagagcggcgccgaagttaagaagcctggggcgtccgtaaaagtgtcctgcaaggcctccggatatactttttctaactactacatgcattgggtgcgacaggcacccggccagggtctggagtgggtgggctggatgaacccgaaaagcgggaatactggttatgcacagaaatttcaagggcgggtgacaatgaccagggacacgagcacgagcacagtttacatggaactcagttcactgcgctcggaggataccgccgtctactattgtgccagaggccggacctggattcagtcctcgctgggttattggggtcagggaactcttgtgacagtgtccagtggtggcggaggatcaggcggaggagggtctggaggcggaggctcagacattcaaatgacccagtcacccagctcattgtccgcctctgtaggcgatagagtgactattacttgtagggcttctcagtacatctctcgctggttggcttggtatcagcaaaagccagggaaagcaccaaaactcctgatctatgggagttctaccctacaatccggcgttccatctcgtttctccgggagtggcagcggaaccgatttcaccctcacgataagcagcttacagcccgaggacttcgctacatattactgccaacagtactacagtacacctttcacctttggccctgggacaaagctggaaatcaag

SEQ ID NO: 773 - DNA, 729 bp, synthetic construct
  source 1..729: mol_type = other DNA
caggtccagctcgtccagagcggcgccgaagtgaaaaaacccggagcttcagtgaaagtttcctgcaaagcctccggttataccttcactggttactacattcactgggtccggcaggctccaggccaagggttggagtggatggggtggatgaatccacatagtggcaacaccggatacgcccagaaattccaagggcgggttacaatgacacgtgatacctctacttctactgtgtatatggaactcagctcgctgcgctctgaggataccgctgtgtactattgcgccagggagggcggtcgatacagttctggcagactggggtattggggacaagggacacttgtcacagtatccagcggaggaggaggatcaggcggaggaggctcgggaggcggtggttcagacattcagatgactcagagtcccagctcactgtcagcttctgtgggcgacagagtgaccattacatgccgcgcaagtcaagggatctcctcctggttggcgtggtatcaacagaagcccggcaaggcacctaagctgctgatctacgcagccagcaccctacagactggggtgccttctaggtttagcggtagtggcagcgggactgacttcacgcttacgatcagctccttacagccggaagattttgccacctactattgtcaacagtccaaatccatacctataacctttggcggcgggacaaaggttgagatcaag

SEQ ID NO: 774 - DNA, 741 bp, synthetic construct
  source 1..741: mol_type = other DNA
caagtgcaactggtgcagagcggcgctgaggttaaaaagccgggcgccagcgtcaaagtgtcctgcaaggcctccggttacacgttcaccggctactacatgcattgggtccggcaggcaccaggccagggcctggaatggatggggaaaatctcagcccactctggggaaaccaagtatgctcagaacgtgcaaggccgagtcacaatgactagggacacgagcacttcgaccgtctacatggagctgtctagcctacggagtgaagataccgcagtgtattactgcgcaagggcgaactactatggggattatgtaaactactattatgggatggacgtctggggacaagggactaccgtgacagtgtcctctggtggtggcggaagcggaggaggagggtcaggtggaggcgggtcagacattcagatgacacagtctccaagctccctgtccgcttcagttggagatcgcgttacaattacctgtcaggcctcccaggacatcagtaattacctgaattggtaccagcagaaacccggcaaagctcccaaacttctcatatacaaggcctccagcctcgagagcggcgtgcctagtagattttctggttctgggagtggcacagatttcaccttgaccatttcaagtttgcagcctgaggacttcgccacttattactgtcaacagacttatacgatacccatcacatttgggcagggaactcgtttagagatcaag

SEQ ID NO: 775 - DNA, 723 bp, synthetic construct
  source 1..723: mol_type = other DNA
gaagtgcagctgctcgaaagcggcggcgggctggtgcagcctggaggttcattacggttgtcatgcgcagcgagcggcttcaccttctcctcccgcgctatgagttgggtgcgacaggcacctgggaaaggcctggagtgggtatccaggattaattatgatgggtctgccacaacttatgccgactctgttaagggccgatttaccatatcccgcgacaattccaaaaacacgctgtacttgcagatgaactcgcttagagctgaggacaccgcggtgtactattgcgccagaggcataactatttttggggtcttcgattactggggacaagggacacttgtaaccgtgtcctccggaggaggtggatcaggaggcggcggttctggcggaggagggagtgacattcagatgactcagagcccatcttcgctgtcagctagtgttggggatagagtcaccatcacctgtagggcttctcagtcaatctctacatggctcgcctggtatcaacagaagccaggcaaggcacccaaactgctgatctaccgggccagcaacctccagagcggcgtgccgagtcgttttagcggctctggaagtggtactgatttcacgctcaccatctccagcctacagcccgaggactttgccacatattactgtcaacaaagctacagcacacccttaactttcggcggaggcacaaaggtcgaaatcaag

SEQ ID NO: 776 - DNA, 729 bp, synthetic construct
  source 1..729: mol_type = other DNA
gaagtccaactgctcgaatctggcggcggcttggttcagcctggcgggagcttgcggctctcatgtgctgccagcgggttcaccttctcctcctatgccatgcattgggttcgccaggcacccggcaagggcttagagtgggtgtcttacataagtagtagtggcagcaccgtgtactacgccgattctgttaaagggaggttcaccatctcccgggataatagcaagaatacgctgtacctccagatgaactccctgagagcagaggacaccgccgtgtactattgcgccagagtatctaacgtcactcccaggagcgggtttggctattggggtcagggaacgcttgtaacagtgtccagtggaggtggaggaagcggcggaggtggatcgggaggcggaggttcagacattcagatgactcagagcccgagttcactgtcagcttcggtcggagatcgcgtgaccataacttgcagggcttctcagtcaatcagccgatacctgaactggtatcaacagaagcctgggaaagcgcctaagctgctgatctactcagcatccactctccaaagcggcgtgccctcccgttttagcggctctgggtctgggacagacttcacactaacaataagtagtttacagccagaggactttgctacctattattgtcaacaggcccactctttcccgccatcctttgggcagggtacaaaacttgaaattaag

SEQ ID NO: 777 - DNA, 729 bp, synthetic construct
  source 1..729: mol_type = other DNA
caagtgcagctggctcagtctggggcagaagtcaaaaaacctggcgcctctgtaaaagtgtcctgcaaggcctccggctataccttcacccggcactacatccagtgggtgcggcaggcacctggacaaggcttagagtggatggggtggattaatcccaactccggcaatacgggctatgcccaaaaattccaagggcgcgttaccatgactcgagatacgtccacatctacggtctacatggaactgagttccttgcgctcggaggacacagcggtgtattactgcgctagaggcaggcaatggctccgtggggaatacttccagcactggggacaagggacccttgtcacagtttccagcggaggtggcgggtcaggtggcggtggatcaggcggaggaggaagtgacatccagatgacccagtcaccatcttccctgtcagcgagcgtgggcgacagagtaactattacctgtcaggctagtcaagacattagcagatacctcaactggtatcagcaaaagcccgggaaggcacccaagctgctcatctacggtgccagcaacctgctgagcggcgtgcctagcaggttttctggaagtggttctgggacagatttcactcttacaataagtagcctacagccggaggattttgccacctactattgtcaacaaactcatactactccatatacctttgggcaaggcacaaggttagagatcaag

SEQ ID NO: 778 - DNA, 720 bp, synthetic construct
  source 1..720: mol_type = other DNA
caagtgcagctggtacagagcggcgcagaggtcaaaaagcctggcgcgagcgtcaaagtgtcctgcaaggcctccggcgggagttttagcggctatgctgtgtcctgggttcggcaggcgcctgggcagggtttggagtggctgggcgtaattaatccatccgattcttggaccgccttcgctcagaaatttcagggccgcgttactatgactcgagatacttctacttctaccgtctacatggaacttagtagtctcaggtctgaggacacggcagtgtactattgcgctagggaacgcgaggatgatgccttcgacatctggggacaagggaccacggtcacagtgtcctccggcggtggaggaagcggaggaggaggttcaggaggcggagggtcagacatacagatgacacagtcgccctcatcactgtcagcctctgttggggatagagtgaccattacctgtagagcttcgcaagggattaggaactggttggcctggtaccagcagaagcccggcaaagcaccaaagctgctgatctacagagcaagcacgctacagagcggcgtgcctagccgttttagcgggagcggtagtggcacagacttcacccttaccatctcctccttacaacccgaagacttcgccacatactattgtcaacagagttatacaactccgtttacattcgggcagggtacaaagctcgagatcaag

SEQ ID NO: 779 - DNA, 729 bp, synthetic construct
  source 1..729: mol_type = other DNA
caagtgcagctcgttcagtctggggcagaagtgaaaaaacctggggcgagtgtcaaagtgtcctgcaaggcctcaggcggcacattctcaagttatgccatctcctgggttcggcaggctccaggccagggcttggaatggatggggataattaatccgcgtggcgggtcaaccaactacgctcagaagttccaagggcgggtaacaatgaccagagataccagcactagcaccgtctacatggagctcagctccctacgctcagaagataccgccgtgtactattgtgcaagggaaggttctagctggtattatgacgcctttgatatatggggacaaggaactatggtcacagtgtcctccggcggtggaggatctggtggaggcggaagtggaggtggagggagtgacattcagatgactcagagccctagctcgctgtcggcttctgtaggcgatagagtgactattacttgccgagcttctcagagtatttccagctacctgaattggtaccagcagaagcccggcaaagcacccaagctgctgatctacgcggcctataaccttcaatctggggtgccatcaaggttcagcggctccgggtctggcacagacttcacccttacaatcagtagcttacagcccgaggactttgccacctactattgtcaacagtcctactcaatcccttttacgtttggaggtggcacgaaggttgagatcaag

SEQ ID NO: 780 - DNA, 729 bp, synthetic construct
  source 1..729: mol_type = other DNA
caggtccagctcgtacagagtggcgcagaggtcaaaaaaccgggcgccagcgttaaagtgtcctgcaaagcctccggtggcacattctcctcctacgctatctcctgggttcggcaggctccaggtcaagggctggaatggatggggtggatgaatcccaactccggcgatacacattatgcccaaaagtttcagggccgcgtaaccatgactagggacacctctacgtcaactgtctacatggagctgtcatcactaagatctgaagatactgccgtgtactattgtgcccgagaagggtctagttggtactacgatgcttttgatatttggggacaaggcacccttgtgactgtgtcgtccggaggtggaggctccggaggaggagggtcaggtggaggaggctctgacattcagatgacacagagccctagcagtctgtcagccagcgttggcgacagagtgaccatcacctgtagggcttctcagtcaataagccggtggttggcatggtatcaacagaagcccgggaaggcacccaagctgctgatctacgcagcgagcaccctccagaccggcgtgccatcgcgttttagcgggtctggcagcggcacagacttcacccttacaattagtagtttacagcctgaggactttgcgacttactattgcttgcagcacagctcttatcctttcacgttcgggcaagggacaaaggtggagatcaag

SEQ ID NO: 781 - DNA, 714 bp, synthetic construct
  source 1..714: mol_type = other DNA
caggtccagctcgtccagtctggggctgaagtgaaaaaacccggcgccagcgttaaagtgtcctgcaaggcctcaggctattccttcacctcccactacatgcattgggttcggcaggctcctggccaagggttagaatggatgggttggatgaacccgaactccggcaataccggttatgctcagaagttccaagggcgagtcacaatgactcgtgatactagcacttctacagtgtatatggagctgagtagtctgcgcagtgaagatactgccgtatattactgtgcacggcttgggcagcagctggattactggggacaagggactcttgtgaccgtgtcctccggcggcggaggttcaggaggcggaggatcaggaggaggaggctctgacattcagatgacccagtcgccctcgtcactgtcagcgagtgtgggcgatagagtaaccatcacctgtagggcatctcagagcatccgcaattacctcaactggtaccagcagaagccagggaaagcacccaagttgctgatttacgaggcctccagactacagtctggtgtgccgagcaggtttagcggttccgggtctggcacagacttcacgctcacaataagtagcttgcagccagaggactttgccacctattactgccaacaaagctatagcgctccacctacatttgggcctggcacgaaggttgacatcaag

SEQ ID NO: 782 - DNA, 732 bp, synthetic construct
  source 1..732: mol_type = other DNA
caagtgcagctcgtccagtctggggctgaagtgaaaaaaccgggtgcctccgtcaaggtgtcctgcaaggcctcaggctacactttcatagggtactacatgcattgggtacggcaggcacctgggcaaggtctagaatggatggggcggattaatcccaactccggcgaaactaactatgctcagaagtttcagggccgagtaaccatgactagggacaccagcaccagcacggtctacatggagctgtcatctttgaggagcgaggacaccgctgtgtactattgcgctagagttagagtgcgcggcgtgatacaccctggctttgatccctggggtcagggaacacttgtcaccgtgtcctccggaggcggaggatctggcggaggaggctctggtggtggtggcagtgacattcagatgacacagagtcccagctccctgtcagcctcggttggggaccgcgtcaccatcacctgtcaggcctcacaagatattagtaattacctgaactggtatcagcaaaaacctggcaaggcaccaaagctgctgatctacgcggcaagctccttacagtctggggtgccctcgcgttttagcggaagtggaagtggcacagatttcacgcttactatctcaagcctccagcctgaggatttcgccacttattattgtcaacagtcttatagcacaccagtgacattcgggccagggacaaaagttgacatcaag

SEQ ID NO: 783 - DNA, 729 bp, synthetic construct
  source 1..729: mol_type = other DNA
caagtgcagttagttcagtctggtgcggaggtgaaaaaacctggggcatctgtgaaagtgtcgtgcaaggccagcggctatacctttcggaactactacatccactgggtccgccaggctcctggtcagggcctagaatggatgggcaggattaatccaaactcaggcggcacaaactacgcccagaagtttcagggacgtgtgactatgactagggatacctccacctccaccgtctacatggaactgagtagtctcagatctgaggatactgctgtgtactattgcgcccgcgccagaattgctgtcgccgtttccgggttcggctattggggtcagggaacattggtaacagtgtcaagtggtggcggcggaagtggcggaggaggatctggtggcggtggatctgacattcagatgactcaaagcccatcatccctgagtgcctctgtgggcgaccgggtcacaataacctgtcaggcatcacaggacatcagcaattacctgaattggtatcagcaaaagcccgggaaagctcccaagctgctgatatacgcagcgagcagcctccatagcggagtaccttctcgattcagcgggtccgggtccgggaccgatttcactcttacaatcagctcattgcagcccgaagattttgcaacctattattgtcaagagtcctcgtcctttccgtacacgttcgggccagggacgaaagttgacatcaag

SEQ ID NO: 784 - DNA, 720 bp, synthetic construct
  source 1..720: mol_type = other DNA
caggtccagctcgtccagagtggcgcggaagtgaaaaagcctggcgccagcgtaaaagtgtcctgcaaggcctccggctataccttttcacggtggtatatgcattgggtccggcaggcaccaggccaagggctggaatggatgggtcgcattaatcccaactccggcggcactaactatgctcagaaattccaagggcgagtaactatgactagggacacatctaccagcacagtttacatggagctgtcaagtttgaggtctgaggataccgccgtgtactattgcgccagagttggcggttatgggtggtttgatccttggggacaagggaccctggtgacagtgtcctccggcggaggaggaagtggcggaggaggatctggcggtggtggtagcgacattcagatgacgcagagcccatcttccctatccgcttcggttggggatagagtgactattacctgtcaggcaacgcaggacatacgcaattacctgaactggtaccagcagaaacccggcaaggctccgaagctgcttatctacgcaacatcatcattacaaagcggagtgccatctcgtttttctgggagtgggtcaggcacagatttcaccttgaccatcagctcgcttcagcccgaggacttcgccacctactattgtcaacagagttacagccctccgtacacgttcgggcagggaacaaagctcgaaatcaag

SEQ ID NO: 785 - DNA, 729 bp, synthetic construct
  source 1..729: mol_type = other DNA
caagtgcagctggtacagtcaggcgccgaagtcaaaaagcccggagcctcggttaaagtgtcctgcaaggcctctggttacactttttcccggtatttcatgcattgggtgcggcaggcacctggccagggtttggagtggatggggtggattaatcccaactccggtggcaccaactacgcccaaaagtttcagggaagagtgactatgaccagggatacctcaacttccaccgtctacatggaactcagctctctgcgcagcgaggacaccgctgtgtactattgcgctagagtccgaattgggtggctccagtcacctccactgtactggggacaagggacacttgttacagtttcctctggaggcggagggtcaggtggcggaggaagtggcggtggcggatctgacattcagatgacacagtctccaagcagtttgagcgccagtgtgggcgaccgtgtaactatcacgtgtagagcaagtcagtcaatcagcacatggctcgcatggtatcaacagaagcccggcaaagctccaaaactgctgatctacgcggcgagcagtttacagtccggcgtgccttcgaggttttctgggtccgggtccgggaccgatttcacccttacaataagcagcctacagcccgaggattttgctacgtactattgtcaacagtcttatgggttcccgtggactttcggccagggtacaaaggtcgaaatcaag

SEQ ID NO: 786 - DNA, 726 bp, synthetic construct
  source 1..726: mol_type = other DNA
caggtccagctggtgcagagcggtgcagaagtcaagaagcccggtgcaagcgtaaaagtgtcctgcaaggcctccgggtacaccttcaccggttatttcatgcattgggtccggcaggctcctggccaagggttggaatggatgggctggatgaatcccaactccgggaataccggctacgctcaaaaatttcaagggcgcgtgaccatgacaagggatacaagcacctccaccgtgtatatggagctcagctctctgagatcagaggatacagccgtttattactgcgttcgagggaggacttggattcagtcaagcctggggtactggggtcagggaacgcttgtgacagtctcatctggaggaggcggaagcggaggaggcggaagtggaggtggcggaagcgacattcagatgactcagtctccaagctcgctgtcagctagtgttggcgacagagtaactatcacttgtcgggcctcgcagtccatctcctcatatctcaactggtatcaacagaaaccgggcaaggcacctaagctgctcatttacgcggcctcctccctacagtctggggtgcctagtcgttttagcgggtctggctctgggaccgacttcactcttacaataagtagtttgcagccagaagatttcgccacttactattgtcaacagagttactctacgcccttaacctttggcggcggcacaaaagtggagatcaag

SEQ ID NO: 787 - DNA, 744 bp, synthetic construct
  source 1..744: mol_type = other DNA
caagtgcagctggtccagtctggggcggaagtgaaaaagcccggagctagtgtaaaggtgtcctgtaaagccagcggctacaccttcaccggttattacctgcattgggtccggcaggctcctggccagggcctggagtggatgggctggatttccgcatataacggaaacacaaattacgcccagaacctgcaaggccgcgtgaccatgaccagggacacaagcactagcactgtctacatggagttgtctagcttgagaagcgaagataccgctgtgtactattgcgcccgacactcttactcgggctcatactcaacgctaccctattatgggatggatgtttggggtcaagggacaacggtcacagtatcctctggaggcggtggcagcggaggaggcgggtctggaggtggtggatcagacattcagatgacccagtcaccaagttccttatccgcaagcgttggggatcgtgttacaattacttgcagggcctcgcaagggatctctaattatctcgcttggtaccagcagaaacctgggaaagcacccaagctgctgatctacactgcaagcacactttttccaggagtgccgtcaagattctctgggtccgggagtggcactgacttcacccttaccatctcctccctccagcctgaggactttgccacatattattgtcaacagagttactccataccactcacgtttggcggcggaacaaaagttgaaatcaag

SEQ ID NO: 788 - DNA, 729 bp, synthetic construct
  source 1..729: mol_type = other DNA
caggtccagttggtacagagcggcgccgaagtgaaaaagcctggggcgtccgtcaaagtgtcttgcaaggcctccggctatacattcaccgggtactacatgcattgggtgcggcaggcacctggccagggtctagaatggatgggccggatcaatcccaactccggcggcacaaactatgctcagaaatttcaaggtcgcgtcaccatgacccgtgacacaagtacgagcaccgtctacatggagctgtcctccctcaggagcgaggatacagccgtgtactattgtgcaagggagcgcgccggctatagcagcgggcagttcgattattggggacaagggactctggtaactgtgtcctccggaggcggaggatcaggcggaggaggctcaggaggtggaggttctgacattcagatgactcaatctccctcgtcactgtcagctagtgttggggatagagtgactattacctgccgagccagtcagtcaatatctaactggctcgcatggtaccagcagaagccagggaaggctcccaaactgctgatctacgccgcgagcacccttcagaatggcgtgccgtctagatttagcggttctgggtctgggaccgactttacacttactatcagtagtttacaaccagaggactttgctacttattactgtcaacagagctacaccttccctattacgttcggccagggaacaaaagttgaaatcaag

SEQ ID NO: 789 - DNA, 729 bp, synthetic construct
  source 1..729: mol_type = other DNA
caggtccagctggttcagtctggcgcggaagttaaaaagccaggcgcctccgtcaaagtgtcctgcaaggcctccggctatactttcaccggttattacatgcattgggtgcggcaggcacctgggcaagggctggaatggatgggatggattaacccgaactccggaggcacacactatgcccaaaagtttcagggacgggttacaatgactcgtgacacttcaactagcaccgtctacatggagcttagtagtttgaggtcagaggacaccgctgtgtattactgcgctagagtgcgaatcgggtggctgcagagtccaccactgtactggggacaagggactttggtaacagtgtcaagcggcggaggtggatcaggaggcggcggtagcggaggaggtggatctgacattcagatgacccagtcgccgtcctccctatccgccagtgtcggtgatcgcgtaaccattacgtgtagggcctctcaagggatcagcaattacctcgcatggtaccagcagaaacccgggaaggcacccaaactgctgatctacgctacaagcagactccagtcaggcgtgccctctcgcttctctggcagcgggtctggcaccgatttcacccttacaataagtagcctccagcctgaggattttgctacgtattattgtcaacagagctacaagactcccttaacctttggcggcgggacaaaagtggaaatcaag

SEQ ID NO: 790 - DNA, 729 bp, synthetic construct
  source 1..729: mol_type = other DNA
caagtgcagctggtccagagcggtgccgaagtgaaaaagcctggggcgtccgtgaaagtgtcctgtaaggccagcggatataccttcaccaactactacatgcattgggtccggcaggctcccggccaagggctggaatggatggggtggattaatccaaaatctggcggcacttcttatgcacagaagttccagggccgcgttactatgactagggatacaagcaccagcactgtctacatggaactgtcgagtttgagaagtgaggatacagcagtgtattactgcgccagcgggaagcaatggctcgtaggaggtcgattcgactattggggtcagggaacacttgtcaccgtttcatccggaggaggagggtctggtggaggagggtctggaggtggcgggtcagacattcagatgacgcagagtccaagctccttgtccgcttctgtgggcgatagagtaaccattacttgcagggcttcacagagcatctcttcatacctgaactggtaccagcagaaacccgggaaggcacccaaacttctcatctacgctgcctcctccctacaatccggcgtgccgagtcgtttttcaggctcgggctctggcaccgacttcacactcacgataagtagtttacagcctgaggactttgccacctactattgtcaacagagctatagcacacctctgacctttggcggcgggacaaaggttgagatcaag

SEQ ID NO: 791 - DNA, 723 bp, synthetic construct
  source 1..723: mol_type = other DNA
caggtccagctggttcagtctggcgcagaagtgaaaaagcctggggcatctgtaaaggtgtcctgcaaggcctccggatataccttcactagatattacatccactgggtgcggcaggcacctgggcaagggctggaatggatggggtggatgaatccgaactccggcaataccgggtttgcccaaaaactgcaagggcgagtaacaatgaccagggataccagcacaagcacggtctacatggagctcagctccctccgctctgaggacaccgctgtgtactattgtgcccgcggtccctttcctagaggacggctcgacctgtggggacaaggcacacttgtcacagtgtcctccggtggtggaggaagcggaggaggcggttcaggcggaggaggcagtgacattcagatgactcagtctccaagctccttgtcagcgagtgttggggatagagtgacaataacttgcagggctagtcagggtattagtcggtggctaggctggtaccagcagaaacccgggaaggctccaaaactgctgatctacggcgccagcaacttgcagactggggtgccctcgcgtttctcaggctcaggctctgggactgacttcacccttaccattagtagcttacagcccgaagattttgccacctattattgtcaacagtcatacagctctccaaggacgttcggccagggtacaaaggttgagatcaag

SEQ ID NO: 792 - DNA, 723 bp, synthetic construct
  source 1..723: mol_type = other DNA
caggtccagctggtccagtcaggcgccgaagtgaaaaagcctggggcgtccgtgaaagtgtcctgcaaagcctccggctatacatttacccgatactacatgcattgggtgcggcaggctccaggccaagggctggaatggatggggataatcaatcccacaggcgggtctacatcgtatgcacagaagttccaagggcgcgtcactatgactcgagacacctctactagcacggtctacatggaactaagtagcctccgcagcgaggataccgccgtgtattactgcgctagaggcaggacctggattcaatctagcctggggtattggggtcagggaacacttgttaccgtgtcctccggaggaggaggttccggtggcggagggagtggaggaggtggatctgacatacagatgacacagtctcctagttccttgtcagcttcggttggcgatagagtaaccattacatgcagggcctctagatcaatcaacaggtggttggcgtggtatcaacagaaacccgggaaagcaccaaaactgctgatctacggagcatcaactttacagagtggcgtgcctagccgtttttctggcagcggtagtggtactgacttcacacttacgattagtagcctccagccggaggatttcgcaacatactattgtcaacagagctacagcactcccacctttggcggcggcacgaaagttgagatcaag

SEQ ID NO: 793 - DNA, 729 bp, synthetic construct
  source 1..729: mol_type = other DNA
caagtacagttagtgcagagcggagccgaagttaaaaaacctggggcgtcagtcaaagtctcatgcaaggcctccggctataccttcacctcatactacatgcagtgggttcggcaagctcccgggcagggcctggagtggatgggctggatgaaccctaattccggcaatactggttatgcacagaagttccagggccgcgtgactatgaccagagatacctccacttccaccgtctacatggagctaagctccctccgtagcgaagacactgctgtgtactattgtgcacgagtgcgcatcgggtggctgcagagtcctccgttgtactggggtcaagggacactcgtgacagtgtccagcggtggaggtggatctggcggtggaggatctggaggcggaggctctgacattcagatgacccagtcaccttcttcactgtcagcctctgtgggcgaccgggttacaattacatgcagagcttcgcagggaatctccaactatctggcttggtatcagcaaaagcccggcaaagcacccaagctccttatctacgcagcgagcagtttgcagtctggggtacccagtaggtttagcgggtctgggagtggcacagattttactctgacgataagtagccttcagccagaggatttcgccacgtactattgtcaacagtcctactcgattccattcacgtttgggccagggacaaaagtcgacatcaag

SEQ ID NO: 794 - DNA, 726 bp, synthetic construct
  source 1..726: mol_type = other DNA
caagtgcagctcgttcagagcggcgcggaggtcaagaagcctggcgcctcagtcaaagtctcttgcaaggcctccggctatactttcaccacgtattacatgcattgggtgcggcaggctcccggccagggcctggaatggatgggaattattaatccgagcggcgggagtacaagctacgctcagaaattccagggacgggtgactatgacccgagacaccagcacatctactgtctacatggagctgagtagcttgcgctcagaggacaccgccgtgtactattgtgcacgcgggaggagctggtatagaagcaacgtagactattggggacaagggacacttgtaacagtgtcaagtggcggaggcgggtccggtggaggtggttcaggaggtggaggttctgacattcagatgactcagagtccatcgtcactgtcagccagcgttggggatagagtgaccatcacttgcagggctagtcaaagtatctcctcctggctcgcatggtaccagcagaaacctgggaaggctcctaaactgctgatatacgcagcgtcctcccttcagtctggagtgccctcgagatttagcggctctggctccggcacagatttcaccctaacaatatccagcttgcagcccgaagattttgccacctattactgtcaacagtcttactctacaccaaggacgtttggtcaagggacccgtttagaaatcaag

SEQ ID NO: 795 - DNA, 756 bp, synthetic construct
  source 1..756: mol_type = other DNA
caggttcaactggtccagtctggggcagaagtgaagaagcctggagcttctgttaaagtgtcctgcaaggcctccggtcacaccttcactcgatattacatgcattgggttcggcaggcacctggccagggtttggagtggatggggtggattaatccgaactccgggaatactggggacgctcagaaatttcagggccgcgtgaccatgacacgggataccagcaccagcaccgtctacatggaactcagctccctgcgctccgaagatacggcagtgtactattgcgctagggacagaggcatagtggtggtgcccgctgccatcggaggcatggacgtatggggacaaggcaccatggtcacagtgtcaagtggaggaggcggttcaggcggtggcgggtctggtggtggaggatcagacattgtcatgactcaaagtccattgagtctgccagtgacacctggggagcccgcgagcatctcttgtaggagcagccagtccctcctgcactccaacggctataactatctcgactggtacctacagaaacccgggcagagccctcagttactgatctaccttgggtcgaatagggcctctggggtgccagatagattctcaggatctggaagtggcactgatttcacactgaagataagtagagtcgaggccgaggatgttggcgtctactattgtatgcaggcccttcagacacccattacgtttggccaaggcactcgtctggagatcaag

SEQ ID NO: 796 - DNA, 732 bp, synthetic construct
  source 1..732: mol_type = other DNA
caagtgcagctcgtccaatctggggctgaagtgaaaaagcctggagcctccgtgaaggtgtcctgcaaggcctccggctacactttcacgggctatttcatgcattgggtgcggcaggcacccgggcagggactggagtggatgggcaggattaatcccaactccggcgggacaaattacgcgcagaagtttcagggccgcgttaccatgactagagataccagcacttcaaccgtttacatggagctgagcagtctgcgcagcgaggacacggctgtctactattgcgctagaggaaaagggcgatatttcgacctgtggggtagaggcacactcgtaacagtctccagtggaggaggcgggtcaggtggcggtgggtctggaggtggagggtcagacattgttatgactcaaagtcccttgtccctgcccgtgactcctggcgaaccagcctcaatctcctgtcgaagctctcagagccttctccactctaatggctataactatctggactggtaccttcaaaaaccgggccagagtcctcagctcctaatctacttgggatctaacagggcctctggggtgccagataggtttagcggtagtggcagcggcacagatttcaccctgaaaatttcgcgggtagaagcagaggatgtgggtgtctactattgtatgcagggaacacattggccaataacctttgggcagggaacccgtttagagatcaag

SEQ ID NO: 797 - DNA, 747 bp, synthetic construct
  source 1..747: mol_type = other DNA
caggtccaactggtccagtctggggcagaagtgaaaaaacccggcgcctccgtaaaagtgtcctgcaaggcctccggctacactttcacccgatactatctccactgggtccggcaggctcccggtcagggcttagagtggatggggtgggttagtgcatacaatggaaatacaaactatgcgcagaaattccaagggcgcgtgaccatgacccgagacaccagcacttctactgtctatatggagctttcctccctcaggagtgaggatactgccgtgtactattgcgctagaggttactgctcaggcgggtcatgttattggtttgatccctggggtcaagggacgcttgtgaccgtgtcctccggaggaggcggaagcggtggaggaggatcaggcggtggaggctctgacattgtgatgacccagtctccgctgtcactcccagtgacacctggcgaacccgcttcaataagttgtagaagcagtcagtctttgctgcatagcaacggctacaactatctagattggtacttgcagaagcctgggcagtcgccacaactgctgatctacctgggcagcaatagggcatctggggtgcctgaccgctttagcggcagcggtagtggcacagacttcacgctgaaaattagccgtgtagaggccgaagatgttggggtctactattgtatgcaggccctccagactccattaacatttggacaaggcacaaaggttgagatcaag

SEQ ID NO: 798 - DNA, 723 bp, synthetic construct
  source 1..723: mol_type = other DNA
caggttcagctagttcagagcggagccgaggtcaagaagcccggagcgtctgtgaaagtgtcctgcaaagcctccggaggcacattctcctcctatactttgagttgggttcggcaggcacctggccagggcctggagtggatgggatggattcacccgaaaagcggcgtgaccaagaatgcacagaaattccaagggcgggtgactatgacccgagatacttccacgtctaccgtctacatggaactcagctcactgcgctcagaggacaccgctgtgtactattgcgctagaggctgggtgtacggcaggatggacgcctggggtcagggtactacggtcacagtcagtagcggaggtggcggatctggaggaggcgggtctggcggtggagggtcagaaatcgtcatgacccagtctcccgccacactgagtgtatcgcctggggagcgcgccactctgagttgtagagcaagccagagcgtgtcgtccaattacctggcttggtatcagcaaaagcctgggcaggcacccaggttgcttatctacggcgcgtcaactagggctaccgggataccagcccgtttttccgggtctggttcagggaccgaattcacgctcacaattagcagtttacagagcgaagattttgccgtgtactattgtcaacaatacgggacacttccatatacctttggccaaggcacaaaagtggagatcaag

SEQ ID NO: 799 - DNA, 735 bp, synthetic construct
  source 1..735: mol_type = other DNA
caggtccagctcgtgcagtccggagcagaagttaagaagcctggcgcgtctgtgaaagtttcctgcaaggcctcaggttactccttcaccacctattacatccactgggtgcggcaggctcccgggcagggcttggagtggatgggtattattaacccatctggcgggtctacaagctacgctcaaaagtttcagggtcgggtcactatgacacgagatactagcacatctaccgtctacatggagctgagcagtctgcgcagcgaggacaccgctgtgtactattgcgcccgcggcggctactatggctccggatacaattcagtcggttattggggaccagggacgcttgtaacagtatcaagcggaggaggcggtagcggtggcggcgggagtggaggaggtggaagtgaaatagtgatgacccagtcacccgccaccctgagtgttagccctggggaaagggcaaccctgagttgtagagcgtcgcagtcggtgtcctccaacaccctggcatggtatcagcaaaaacccgggcaggctcctaggctcctaatctacggcgcctctactcgtgccactggcattcccgccagatttagcgggagcgggtccggcacagagtttacgcttacaataagttccttgcagtcagaagatttcgcagtgtactattgtcaacaatatggatcttctccgttaacgttcgggccaggcacaaaagtggacatcaag

SEQ ID NO: 800 - DNA, 723 bp, synthetic construct
  source 1..723: mol_type = other DNA
caggttcagttggtccagtctggcgcggaagtaaaaaagcctggagcgtcagtgaaagtgtcgtgcaaggctagtggctataccttcaccaattactacatgcattgggtgcggcaggcaccaggccagggcttggagtggatgggctggatgaatcccaactccgggaacaccggctatgctcagaacctgcaagggcgagtcacaatgacccgagataccagcactagcactgtctacatggagctgtccagcctgcgctcagaggacaccgccgtgtactattgtgcccgcgggaggacttggtttagatccggaatggacgtgtggggtcagggaacgacggtcacagtgtccagtggaggtggtggctcaggcggaggagggagtggaggcggaggaagcgagattgttatgactcagtctccggccacactgagtgtttctcctggcgaaagggcaactctcagttgcagagcatctcaaagcgtgtcctcctacctagcttggtatcaacagaaacccgggcaggcacctaggctgctcatctacggcgcctcgaccagagccaccgggattcccgcccgttttagcgggtctgggagcgggactgagttcaccttaacaataagtagccttcagtcagaagacttcgctgtgtactattgtcaacagtatgatatatctgtgacgtttgggccaggcacaaaggtcgatatcaag

SEQ ID NO: 801 - DNA, 735 bp, synthetic construct
  source 1..735: mol_type = other DNA
caggtccagctggttcagtctggcgcggaagtgaaaaagccgggcgcctccgtcaaagtgtcctgcaaggcctccggttacaccttcactgactattacatccactgggtccggcaagcacccgggcagggcctggaatggatggggtggatttctacttataatgggaacacgaattatgcacagaaactccagggccgcgtcactatgacccgggatacaagcactagcaccgtctacatggagctaagtagcttgcgtagcgaggacaccgctgtgtattactgtgccagaggcatggtgcgaggcatggatgtatggggacaaggaacaatggttactgtttctagtggaggcggcggttcaggtggaggagggtctggaggtggcggttcggacattgtgatgacccagtcaccagatagccttgcagtgtccctgggagaaagggctaccattaattgcaagagcagtcagtcagtgctctactcaagcaacaacaaaaactatttggcttggtaccaacagaagcccgggcagcctcctaagctgctgatctactgggcctctacaagggagtctggggtgccagatcgcttttccgggtccggctccgggacagacttcacgcttacaataagtagtctccaggctgaggacgtagccgtgtactattgtcaacaatactatactacaccctggacctttggccagggaaccagattagagatcaag

SEQ ID NO: 802 - DNA, 738 bp, synthetic construct
  source 1..738: mol_type = other DNA
caagtgcagctggtgcagtctggagcggaagtgaaaaaacctggcgccagtgtgaaagtgtcctgcaaggcctccggttatactttcacgggctatcggatgcattgggttcggcaggcacctgggcaaggactagagtggatgggcgtaattaatccaaatactgggaccgctcgctttgctcagaagtttcagggacgagtcacaatgactagggatacatcaaccagcactgtctacatggagctgagcagcctcaggagcgaagacaccgcggtctactattgtgcttctgtgggcgtctactggtattttgacctgtggggtagaggcacacttgtaaccgtgtcctccggaggaggcgggagtggaggtggaggttccggtggtggagggagtgacattgttatgacacagtctcccgatagcctcgccgttagtctcggcgagcgtgccacgataaactgcaaatcttctcagtccgtgttgtactcaagcaacaacaagaattatctggcatggtaccagcagaaacctgggcaaccacccaaactgctgatctactgggcctcaacccgcgaatctggggtgccggatagattcagcgggagcggctccgggacagatttcacccttactatctcgagtttgcaggctgaggacgttgccgtctactattgtcaacagtactattcagcacccttaaccttcggcggcggcacaaaagtggaaatcaag

SEQ ID NO: 803 - DNA, 747 bp, synthetic construct
  source 1..747: mol_type = other DNA
caggttcagctggtacagtcaggcgccgaagtgaaaaaaccgggtgccagcgtcaaggtgtcctgcaaggcctccggctacaccttcaccggatattacatgcattgggtccggcaggcacccggccaagggctggaatggatggggatgattaatcctagtggtggcgggaccacatacgctcagaagttccaagggcgggttacgatgactcgagacaccagcacgtctaccgtctacatggaactgtccagcctacgctctgaggatactgccgtgtactattgtgcaagggacaggagatcaatgattacctttcgcacagattattggggtcagggaactctcgttaccgtgtcctccggtggcggaggaagtggaggcggaggatcaggaggtggcgggtcagacattgtaatgactcagagcccagatagtcttgcagtgtccttgggcgagagggctacaatcaactgcaagagcagtcagagcgtgctctactcgtctaacaacaaaaattaccttgcgtggtatcaacagaaacccgggcagcctcccaaactgctgatctactgggcttctactagagagtctggcgtgcctgatcgttttagcggttccgggtctgggacagacttcacgttaacaataagtagcctccaggctgaggacgtcgccgtgtactattgtcaacagtactattcaacaccatatacttttggccaaggcaccaagttggagatcaag

SEQ ID NO: 804 - DNA, 753 bp, synthetic construct
  source 1..753: mol_type = other DNA
caggtccaactggtccagtctggcgcggaggttaaaaagcctggggcttcagtcaaagtgtcgtgtaaggcctcgggctatacattcaccggctattacatgcattgggtccgtcaggcacctgggcaagggctggaatggatgggttggatgaatccgaactccgggaataccggttatgcccaaaaattccaagggagagtaactatgacacgagacaccagcactagcaccgtgtatatggaactcagctctctgaggagcgaggacacagccgtgtattactgcgcgggccggaaatggctgggcttggatttctacaactggtttgatccttggggtcagggaactcttgtaacggtgtccagtggcggcggtggctcaggaggaggaggatctggaggaggcggaagcgacattgtgatgactcagagtccggatagccttgcagtgtctttgggcgagcgcgccactattaattgcaaatcctcccagtccgttctctacagctcaaataacaagaactatctcgcatggtaccagcagaagccaggacagccaccaaaactgctgatatactgggctagtaccagacagtctggcgtgcccgacaggttttcagggtccgggagcggcacagacttcacgctaacgataagtagtttacaggccgaggatgtcgctgtgtattactgccagcagtactactctacaccctggacctttgggcaaggcacaaaggttgaaatcaag

SEQ ID NO: 805 - DNA, 717 bp, synthetic construct
  source 1..717: mol_type = other DNA
caggttcaactggtacagagcggcgcggaagtgaaaaaacccggctcgtcagttaaagtgtcctgtaaggcctccggcggcacattctcctcctacgctatctcctgggtccggcaagcacccgggcaaggtctggagtgggtgggtggcataatgcccatattcgggacagcgaattacgctcagaagtttcagggaagagtgactattaccgccgatgaatctccatctacggcttatatggaactctccagtctgcgcagcgaggacaccgctgtgtactattgcgccaccgggcgtcgagagttgctgaactggggtcagggaacacttgttaccgtgtccagcggcggaggaggaagtggcggaggaggctcaggtggtggaggttctgagattgtgatgactcagagccctgctacactgagtgtatctcctggggaacgggccaccctcagttgtagagcctctcagagcgtcaactctagatttctagcctggtatcagcaaaagccgggccaggcaccaaggttgctcatctacggcgcatcaactagggcaaccgggattcctgcccgcttctcaggcagcgggtcagggactgagtttacacttacgatcagtagcttacagagcgaggactttgccgtctactattgcatgcagggaactcactggccatacaccttcggccaagggacaaaagtggaaatcaag

SEQ ID NO: 806 - DNA, 735 bp, synthetic construct
  source 1..735: mol_type = other DNA
caggtccagctagttcagtctggggcagaagtcaagaaaccgggtagctcagtgaaggtgtcctgcaaagcaagcggctacactttcacctcatatgatattaattgggtgcgacaggcaccaggccaagggctggaatggatgggcggcatcattcccatcttcgggacagccaattacgctcagaagtttcagggacgggttacgattactgccgatgaaagcacctctactgcctatatggagttaagctctctgcgcagcgaggacaccgctgtgtactattgtgccactacaccaggcgatgctttcgacatatggggtcagggaacaatggttacagtctcatctggaggtggaggatcaggaggaggcgggtcaggtggcggaggcagtgacattgtaatgacccagtctcccgatagccttgccgtgtccttgggcgaaagggcaaccataaattgcaagtcctcccagtccgtcttgtactcgagtaacaacaaaaactatctcgcgtggtatcagcaaaagcccgggcaacctcctaaactgctgatctactgggctagtaccagagagagcggcgtgccagaccgtttttctgggagtggtagcgggactgatttcacccttacgataagtagtctccaggccgaggacgtagcggtgtactattgtcaacagtacagtgacacacctctgacctttgggcaaggcacaaaagtggaaatcaag

SEQ ID NO: 807 - DNA, 714 bp, synthetic construct
  source 1..714: mol_type = other DNA
gaagtgcaactgctcgaatctggcggtgggctggtcaaacctggtggatctcttcggctgtcatgcgcagcctccgggtttaccttctcctcctcctggatgcattgggtgcgacaggcacccgggaaaggcctggagtgggtgtcagccatcgggactgccggtgatacctattaccctggctcggtgaaagggaggttcaccattagccgggatgactccaagaatacgctgtacttgcagatgaactcactcaagactgaggacacggctgtctattactgtgccagagtgcgactcggccactttgacctgtggggacgcgggacacttgtaacagtcagctcaggaggaggcggctctggaggtggcggatctggtggaggcggcagtgacatccagatgactcagtctccgagcagcttgagtgcttctgttggggatcgcgttaccattacatgcagggcctcccagtcaatctctcgttacttaaattggtatcagcaaaaacccggcaaggcacccaagctgctgatttacgcggcgagcagtctccaaagcggagtgccatccagattcagcgggagcgggtcgggcaccgattttacccttacaataagtagtttgcagccagaggacttcgctacatactattgtcaacagtcctatagcaacccacctacttttggccagggaactaagctagaaatcaag

SEQ ID NO: 808 - DNA, 723 bp, synthetic construct
  source 1..723: mol_type = other DNA
gaagttcaactgctcgagtccggcggtgggcttgttcagcacggcggctctttgcggctgtcctgtgctgcgagcggatttgccttctcctcctacgtcctgcattgggttcggcaggcacctgggaagggcctggagtgggtgtccagtatcagttccagtagcagctacatctactacgccgactccgtgaaagggcgattcaccatctcacgcgacaattcaaaaaacacactgtacttgcagatgaacagccttagggccgaggatactgctgtgtactattgcgctcgtggggatcgctatcccggcctgcccaattattggggtcagggaacattagtaaccgtgtctagtggcggaggaggaagcggcggaggcggtagcggtggaggaggatctgacattcagatgacccagtctccaagtagcctaagtgcaagcgtcggcgacagagtaacaattacatgcagagcttcgcaagggatctcaagttggctcgcctggtaccagcagaaacctgggaaagcacctaagcttctcatataccaggcctcaaacaaggatactggggtgccatctaggttttctggctctggctcgggcacggacttcaccctcacaataagcagcttacagcccgaagattttgccacgtattattgtcaacagtcatataggattccgtggactttcgggcagggaaccaaggtggaaatcaag

SEQ ID NO: 809 - DNA, 726 bp, synthetic construct
  source 1..726: mol_type = other DNA
gaggtccagcttctggaatcaggcggcgggctggtccagcctggtggttccttacggttgtcctgcgctgcctccgggtttgcgtttagtggcacttggatgcagtgggtgcggcaggcaccgggcaagggcctggagtgggtttctgacatttccgggtccagtagggacaccaactacgctgacagtgtaaagggacgattcacaataagcagggacaactctaaaaatacgctgtacctccagatgaactctctgcgcgctgaagatacagccgtgtactattgtgcaaaagatcactgggattcatatgggtatctggactattggggacaagggactttggtgacagtgtctagtggaggaggaggatcaggcggtggcggatctggcggaggcggttccgacattcagatgactcagagtccaagcagcctgagcgccagcgttggcgatagagtgaccattacctgcagagcgtcacaatccatctcgggttggctggcctggtaccagcagaagcctgggaaagcacccaagctcctcatctacgcagcttcgaccctacgtgatggggtcccatctcgctttagcgggagtggctctggcactgatttcacgctcacaataagcagccttcagcccgaggacttcgccacctactattgtcaacaggccaattcctttcccttaaccttcggacaagggacaaaagtggaaatcaag

SEQ ID NO: 810 - DNA, 720 bp, synthetic construct
  source 1..720: mol_type = other DNA
gaagtccaactgctcgagagtggcggcgggcttgttcagcctggcggttctttgcggctgtcatgcgccgcgagcggcttcatgtttgactattacgccatgcattgggttcgacaggctcccgggaagggcctagagtgggtgtccttgatctcctatgatgggaggaacaagtactacgccgactcagtgaagggccgcttcacaatcagccgggataattccaaaaacaccctgtacctccagatgaacagccttagagccgaagataccgctgtctactattgtgcaaggcccgggagctattctagatttcagcactggggtcagggaacattagtgacagtgtcgtctggaggaggtggaagcggtggcggtggatctggaggaggcgggagcgacattcagatgacccaatcgccaagttccctgagtgcttcagtcggcgaccgcgtaactattacctgtagagccagtcaagggatttctaataacctgaattggtatcaacagaagcccgggaaagctcctaaactgctgatatacgcggcatcctccctccagtcaggcgtgcctagtcgttttagcgggtctggctcaggcactgactttacactcacgatcagctccttacagccggaggatttcgccacttattactgccagcaggcaaataacttcccaataacgttcgggcagggaaccaaagtggaaatcaag

SEQ ID NO: 811 - DNA, 729 bp, synthetic construct
  source 1..729: mol_type = other DNA
gaagtgcagctgctcgagtcgggcggcgggctggtgcaaccaggagggtcattacggttgtcatgcgctgcctctgggtttacgttcggagcctacgtgatgcattgggtccggcaggcacctgggaaaggcctggagtgggtgtcctccattagtggcggcagcacttactacgccgactccgttaaagggagattcacaataagcagggacaactcaaagaacacgctgtacctccagatgaatagccttcgcgcagaagataccgccgtgtactattgcgccaggcacccagtccgtggcgtgattggggcaggctggttcgatccttggggtcagggtacacttgtaacagtgtccagtggaggaggtggaagtggtggcggaggttctggaggaggagggtccgacatacagatgactcagtctccaagctccttgtcagcttctgttggggaccgagttaccatcacttgtagggcctcacaaaatatctcccgctggctggcttggtatcagcaaaagccgggcaaagctcccaagctgctgatctacgcggcgagtagcctccagtcgggagtacccagcagatttagcggctccgggtctgggaccgatttcaccctaacaatcagtagcctccagcccgaggattttgccacttattattgtcaacaggcaattagcttccctttaacctttggcggtggcaccaaggtcgaaatcaag

SEQ ID NO: 812 - DNA, 729 bp, synthetic construct
  source 1..729: mol_type = other DNA
gaggttcagcttctcgagtcgggcggagggctagttcagcctggcgggtctttgcgtctgagctgtgccgccagcggctttaccttctcctcatacgccatgcattgggttcgacaggctcctgggaagggcctggagtggctcgccgtaatctccttcgacgggtctatcagacactatgcggactccgtgaaaggcaggttcaccatttctcgggacaattccaagaacacgctgtacttgcagatgaacagtctgcgggcagaagataccgccgtgtactattgcgccaaaccaaaggcctccagcgggccgcgcttgatagattactggggacaagggactcttgtgaccgtcagctcaggtggaggaggaagtggcggtggtgggtctggtggtggcgggagcgacattcagatgacacagagtccatcttcactgtcagcttcggtcggcgacagagtgactattacatgtcgagcatcccaaggaatctccaattctctggcgtggtatcaacagaaacccggcaaagctcccaagctgctgatatacagcgcagtgaacctccagagcggagtgccctcacgcttttccggaagtggctctgggactgattttacacttacgataagtagcctccagcctgaagatttcgctacatattactgccaacaggcaaatagctttccattaactttcggcggcggaacaaaagtcgaaatcaag

SEQ ID NO: 813 - DNA, 735 bp, synthetic construct
  source 1..735: mol_type = other DNA
gaagtgcagctgctcgaaagtggaggcgggctggttcaacccggagggagcttgcggctctcatgcgctgcgagcggttttaccttctcctcctatgccatgcattgggttcggcaggcgcccgggaaaggcctggagtgggtgtcctccatctcaagtagctctacctacattcactacgccgatagcgtcaagggtagattcacgatctcccgcgacaacagcaaaaataccctgtacctccagatgaactccttacgagccgaggacactgctgtgtactattgtgcaagggtggggaggtattacggcagcggctcatcactggtagactattggggacaagggacacttgtcaccgtgtctagcggcggcggtggatcaggtggcggaggaagtggaggtggagggtctgacattcagatgactcagtcgccatcatcgttgtccgctagtgtcggcgatagagtgactattacctgccgtgcctctcagagcgtgtcctcctggctggcatggtatcaacagaaacctgggaaggcaccgaagctgctcatctacgatgcctctagtctacagtctggcgtaccctcccgctttagcggctctgggtctggcaccgatttcactcttacaataagcagtttacagcctgaggacttcgccacatattactgtcaacaggctaaaagttttccacctacgtttggccaagggacaaaggtcgaaatcaag

SEQ ID NO: 814 - DNA, 744 bp, synthetic construct
  source 1..744: mol_type = other DNA
gaagtgcagttactcgagagcggcggcggattggtccagcctggcggtagcctgcggttgtcatgcgctgcgagtgggttcaccttctcctcatacgccatgtcgtgggtccggcaggcacccggcaaaggcctggagtgggtgtcctccatcagtagtgcttctagctacaagtattatgccgactccgtgaaagggcgatttaccatctcccgagacaattccaagaatacgctgtacctccagatgaactctcttcgcgctgaagataccgccgtgtactattgtgcaagggatatatactccagcggatggcgcggctactactactatgggatggatgtttggggacaagggaccacggtgacagtgtcaagtggaggcggcggttctggaggaggcggatctggaggcggcggttcagacattcagatgacccagtctccatcttcactgtcagctagtgttggggatagagtcactataacttgcagggcctctcaagggattaggaacgaccttaactggtatcagcaaaagcccgggaaagcaccgaagctcctgatttacgcagcgacaagactgcaaagcggcgtacctagcagattcagcgggtcgggttccgggactgattttaccctcacaatcagctccctacagccagaggacttcgccacttattactgtcaacaggcccatagttttccctatagctttgggcagggaacacgtctggaaatcaag

SEQ ID NO: 815 - DNA, 750 bp, synthetic construct
  source 1..750: mol_type = other DNA
gaagtccaactcctggagagtggcggcgggctggtacagcccggcggatctttgcggctgagttgtgctgcaagcgggtttaccttctcctcatatgccatgtcatgggttcggcaggcacctgggaagggcctagagtgggtctcagccattagcgggtcgggtggcaatgcgtactatgcggacagcgtgaagggccgtttcaccatcagccgcgacaatgccaaaaacagtctctacttgcagatgaactccctgagggctgaggacactgcggtgtactattgcgccaaaaatagttggggctcttataggccaagagcctttgatatttggggacaagggacaatggtgactgtgtcctccggcggaggtggatcaggtggcggaggaagcggaggtggagggagtgacattgtgatgacacaaagcccagattctcttgctgtcagcctcggagagagagccacgatcaattgcaaatcctcccagtctgtgctgtactcatctaacaacaagaactatctcgcatggtaccagcagaaaccgggccagcctcccaaactgctgatctactgggcctctacccgagcatcgggcgtgcctgaccgctttagcgggtctgggtctgggaccgatttcactcttacaataagttccttacaagcagaagatgtcgccgtttattactgccagcagtatctgagcttaccctacaccttcggccagggtacaaaagttgaaatcaag

SEQ ID NO: 816 - DNA, 747 bp, synthetic construct
  source 1..747: mol_type = other DNA
caggttcagcttgtccagtctggtgccgaggtgaaaaagcctggcgcgtcagttaaagtgtcctgcaaggccagcgggaatatcttcaccgcacagtacatgcattgggttcggcaggcaccaggccagggtttggaatggatgggctggatgaatccgaataccgtctataccgggagtgcccaaaagttccagggccgagtcactatgacaagagacaccagcacatccactgtctacatggagctaagctctctgcgctcagaagataccgctgtgtactattgcgccagggattgggtcggtgatgggtataatagctttgattattggggacaaggcacattagtaactgtgtccagtggcggaggcggctccggaggaggaggtagtggaggaggagggtcagacattgttatgacccagtcaccagattcgctggcagtgtccctgggcgaaagggctactattaactgtaaaagtagccagtccgtgctctatagcagtaacaacaaaaactacttggcctggtaccaacagaagcccgggcagcctcccaaactgctgatctactgggcctctacaagagagtctggggtgcccgaccgtttttctggctctgggtccggcactgacttcacgcttacgataagcagcctccaggctgaggacgtagctgtgtactattgtcaacagtactataccacacctttcacgtttggcccagggacaaaggtggacatcaag

SEQ ID NO: 817 - DNA, 732 bp, synthetic construct
  source 1..732: mol_type = other DNA
gaagttcagctgctcgaaagcggaggcgggctggtccagcctggcgggagtttacggttgtcctgtgccgcgtctggttttaccttctcctcatacggcatgaattgggtgcgccaggcacccgggaaaggcctggagtgggtcagcgctattagtggttctggtggcaggacttactacgctgattcagttaaagggagattcaccatttcacgagacaacgctaaaaacagcctgtacttgcagatgaactcccttagggccgaggacaccgcagtgtattactgcgctaagggcacatattattcctcgccaaagtattcgtttgactattggggacaaggcactctcgtaaccgtgtcctccggcggaggaggttccggaggaggtggatcaggcggtggagggagtgacatccagatgacgcagagtcctagctccctgtcagcctctgtcggcgatagagtgacaattacttgccgggcgagtcaagatatcaagaatttcctcgcatggtatcagcaaaagcccgggaaagcaccgaaactgctgatctacgccgccagcagcctccagagcggcgtgccatctcgtttttcaggctctgggtctgggacagatttcacacttaccataagtagcttacagcccgaggactttgccacctattactgtcaacagtcttacagcactccttggacgttcgggcagggaacaaagctagaaatcaag

SEQ ID NO: 818 - DNA, 759 bp, synthetic construct
  source 1..759: mol_type = other DNA
gaagttcagcttctcgagagcggcggcgggctggtgcaaccgggaggttctttgcggctgtcatgtgccgcgagcgggctgaccttcagctcatatcagatgtcatccgtcagtcaggcacctggcaaaggcctggagtgggtgtcctacataagcagtgcagccaatactgtgtactatgcggacagcgttaagggccgattcacgatcagtcgggacaactccaagaacactctgtacctccagatgaactccttacgcgcagaggatactgctgtgtactattgcgccagggaagatgagtctagatcgccttattgtagcggcgggtcttgctaccgtgctgaatactttcaacattggggtcagggtacacttgtaaccgtgtcctccggaggcggagggagtggaggcggtggttctggaggaggaggctctgacattcagatgacacagagcccaagctcactgtcagcttctgtaggcgaccgcgtcaccatcacttgcagagcctcgcagggaatttctaattacctagcatggtatcaacagaagccagggaaagctcctaagctgctgatctacgcagcaagtagtctccagagtggagtgccgtccaggtttagcggcagcggttcagggacggacttcaccctcaccataagttccttacagcccgaggatttcgccacctattattgtcaacagagctactctacacccttgacatttgggccagggacaaaagtcgatattaag

SEQ ID NO: 819 - protein, 15 aa, synthetic construct
GGGGSGGGGSGGGGS

SEQ ID NO: 820 - protein, 17 aa, synthetic construct
GGGGSGSGGGGSGGGGS

SEQ ID NO: 821 - protein, 45 aa, synthetic construct
TTTPAPRPPTPAPTIASQPLSLRPEACRPAAGGAVHTRGLDFACD

SEQ ID NO: 822 - protein, 24 aa, synthetic construct
IYIWAPLAGTCGVLLLSLVITLYC

SEQ ID NO: 823 - protein, 42 aa, synthetic construct
KRGRKKLLYIFKQPFMRPVQTTQEEDGCSCRFPEEEEGGCEL

SEQ ID NO: 824 - protein, 112 aa, synthetic construct
RVKFSRSADAPAYQQGQNQLYNELNLGRREEYDVLDKRRGRDPEMGGKPRRKNPQEGLYNELQKDKMAEAYSEIGMKGERRRGKGHDGLYQGLSTATKDTYDALHMQALPPR

SEQ ID NO: 825 - protein, 21 aa, synthetic construct
MALPVTALLLPLALLLHAARP

SEQ ID NO: 826 - protein, 10 aa, synthetic construct
EQKLISEEDL

SEQ ID NO: 827 - protein, 27 aa, synthetic construct
TTTPAPRPPTPAPTIASQPLSLRPEAC

SEQ ID NO: 828 - protein, 22 aa, synthetic construct
FMYVAAAAFVLLFFVGCGVLLS

SEQ ID NO: 829 - protein, 43 aa, synthetic construct
RKRRRQHGQLWFPEGFKVSEASKKKRREPLGEDSVGLKPLKNA

SEQ ID NO: 830 - protein, 283 aa, synthetic construct
MVSKLSQLQTELLAALLESGLSKEALLQALGEPGPYLLAGEGPLDKGESCGGGRGELAELPNGLGETRGSEDETDDDGEDFTPPILKELENLSPEEAAHQKAVVETLLQEDPWRVAKMVKSYLQQHNIPQREVVDTTGLNQSHLSQHLNKGTPMKTQKRAALYTWYVRKQREVAQQFTHAGQGGLIEEPTGDELPTKKGRRNRFKWGPASQQILFQAYERQKNPSKEERETLVEECNRAECIQRGVSPSQAQGLGSNLVTEVRVYNWFANRRKEEAFRHKLAM

SEQ ID NO: 831 - protein, 191 aa, synthetic construct
DEFPTMVFPSGQISQASALAPAPPQVLPQAPAPAPAPAMVSALAQAPAPVPVLAPGPPQAVAPPAPKPTQAGEGTLSEALLQLQFDDEDLGALLGNSTDPAVFTDLASVDNSEFQQLLNQGIPVAPHTTEPMLMEYPEAITRLVTGAQRPPDPAPAPLGAPGLPNGLLSGDEDFSSIADMDFSALLSQISS

SEQ ID NO: 832 - protein, 477 aa, synthetic construct
MVSKLSQLQTELLAALLESGLSKEALLQALGEPGPYLLAGEGPLDKGESCGGGRGELAELPNGLGETRGSEDETDDDGEDFTPPILKELENLSPEEAAHQKAVVETLLQEDPWRVAKMVKSYLQQHNIPQREVVDTTGLNQSHLSQHLNKGTPMKTQKRAALYTWYVRKQREVAQQFTHAGQGGLIEEPTGDELPTKKGRRNRFKWGPASQQILFQAYERQKNPSKEERETLVEECNRAECIQRGVSPSQAQGLGSNLVTEVRVYNWFANRRKEEAFRHKLAMTCRDEFPTMVFPSGQISQASALAPAPPQVLPQAPAPAPAPAMVSALAQAPAPVPVLAPGPPQAVAPPAPKPTQAGEGTLSEALLQLQFDDEDLGALLGNSTDPAVFTDLASVDNSEFQQLLNQGIPVAPHTTEPMLMEYPEAITRLVTGAQRPPDPAPAPLGAPGLPNGLLSGDEDFSSIADMDFSALLSQISS

SEQ ID NO: 833 - protein, 7 aa, synthetic construct
ENLYTQS

SEQ ID NO: 834 - protein, 5 aa, synthetic construct
DDDDK

SEQ ID NO: 835 - protein, 4 aa, synthetic construct
LVPR

SEQ ID NO: 836 - protein, 4 aa, synthetic construct
CPPC

SEQ ID NO: 837 - RNA, 103 nt, synthetic construct
  source 1..103: mol_type = other RNA
ggggccactagggacaggatgttttagagctagaaatagcaagttaaaataaggctagtccgttatcaacttgaaaaagtggcaccgagtcggtgcttttttt

SEQ ID NO: 838 - DNA, 20 bp, unidentified
  source 1..20: mol_type = unassigned DNA; note = AAVS1 target sequence
ggggccactagggacaggat

SEQ ID NO: 839 - RNA, 20 nt, synthetic construct
  source 1..20: mol_type = other RNA
gcacctgaataccacgcctg

SEQ ID NO: 840 - RNA, 20 nt, synthetic construct
  source 1..20: mol_type = other RNA
cgcctgcgatgtagtcgatg

SEQ ID NO: 841 - RNA, 20 nt, synthetic construct
  source 1..20: mol_type = other RNA
caggacgggcgagatgtccc

SEQ ID NO: 842 - RNA, 20 nt, synthetic construct
  source 1..20: mol_type = other RNA
ctgaatctttggagtacctg

SEQ ID NO: 843 - RNA, 20 nt, synthetic construct
  source 1..20: mol_type = other RNA
ggccacggagcgagacatct

SEQ ID NO: 844 - RNA, 20 nt, synthetic construct
  source 1..20: mol_type = other RNA
aagtcaacttcaatgtcgga

SEQ ID NO: 845 - RNA, 20 nt, synthetic construct
  source 1..20: mol_type = other RNA
gcttggaggcctgatcagcg

SEQ ID NO: 846 - RNA, 20 nt, synthetic construct
  source 1..20: mol_type = other RNA
cttatctcttcgcagcgagg

SEQ ID NO: 847 - RNA, 20 nt, synthetic construct
  source 1..20: mol_type = other RNA
cacacattactccaacattg

SEQ ID NO: 848 - RNA, 20 nt, synthetic construct
  source 1..20: mol_type = other RNA
ttccgcaaaatagagcccca

SEQ ID NO: 849 - RNA, 20 nt, synthetic construct
  source 1..20: mol_type = other RNA
tgcacagaactatcgtacca

SEQ ID NO: 850 - RNA, 20 nt, synthetic construct
  source 1..20: mol_type = other RNA
gcaataagactctttaaaga

SEQ ID NO: 851 - RNA, 20 nt, synthetic construct
  source 1..20: mol_type = other RNA
caaagagattacgaatgcct

SEQ ID NO: 852 - RNA, 20 nt, synthetic construct
  source 1..20: mol_type = other RNA
caaggcaccccaggtttcca

SEQ ID NO: 853 - RNA, 20 nt, synthetic construct
  source 1..20: mol_type = other RNA
ttacgaatgccttggaaacc

SEQ ID NO: 854 - RNA, 20 nt, synthetic construct
  source 1..20: mol_type = other RNA
cagagacgcatctgaccctc

SEQ ID NO: 855 - RNA, 20 nt, synthetic construct
  source 1..20: mol_type = other RNA
catgcagttctcacacactg

SEQ ID NO: 856 - RNA, 20 nt, synthetic construct
  source 1..20: mol_type = other RNA
gtgtgagaactgcatggaga

SEQ ID NO: 857 - RNA, 20 nt, synthetic construct
  source 1..20: mol_type = other RNA
tctcatttcaggaaaccact

SEQ ID NO: 858 - RNA, 20 nt, synthetic construct
  source 1..20: mol_type = other RNA
agtcatacaccttaaccaag

SEQ ID NO: 859 - RNA, 20 nt, synthetic construct
  source 1..20: mol_type = other RNA
ttcaaggaaaccagttgagg

SEQ ID NO: 860 - RNA, 20 nt, synthetic construct
  source 1..20: mol_type = other RNA
gagccttgcctggaaatctg

SEQ ID NO: 861 - RNA, 20 nt, synthetic construct
  source 1..20: mol_type = other RNA
aagcgtcaaaagtctgccag

SEQ ID NO: 862 - RNA, 20 nt, synthetic construct
  source 1..20: mol_type = other RNA
cgttccaactcgaagtgcca

SEQ ID NO: 863 - RNA, 20 nt, synthetic construct
  source 1..20: mol_type = other RNA
gagcgactgggacacggtga

SEQ ID NO: 864 - RNA, 20 nt, synthetic construct
  source 1..20: mol_type = other RNA
gctgcgcaagaagggcccta

SEQ ID NO: 865 - RNA, 20 nt, synthetic construct
  source 1..20: mol_type = other RNA
ttgttctggccagcagcccc

SEQ ID NO: 866 - RNA, 20 nt, synthetic construct
  source 1..20: mol_type = other RNA
cttccagagccacatcatcg

SEQ ID NO: 867 - RNA, 20 nt, synthetic construct
  source 1..20: mol_type = other RNA
gggactcaccagagagaggt

SEQ ID NO: 868 - RNA, 20 nt, synthetic construct
  source 1..20: mol_type = other RNA
cggtcgaaatagaagcccta

SEQ ID NO: 869 - RNA, 20 nt, synthetic construct
  source 1..20: mol_type = other RNA
aaaaggatattgtgcaactg

SEQ ID NO: 870 - RNA, 20 nt, synthetic construct
  source 1..20: mol_type = other RNA
tgtgcatatttattacatcg

SEQ ID NO: 871 - RNA, 20 nt, synthetic construct
  source 1..20: mol_type = other RNA
tttgtgaagatcttgaccaa

SEQ ID NO: 872 - RNA, 20 nt, synthetic construct
  source 1..20: mol_type = other RNA
tgtcatgctgaaccgcattg

SEQ ID NO: 873 - RNA, 20 nt, synthetic construct
  source 1..20: mol_type = other RNA
ccactctatgaggatagtca

SEQ ID NO: 874 - RNA, 20 nt, synthetic construct
  source 1..20: mol_type = other RNA
ttgacatagaagaggcacaa

SEQ ID NO: 875 - RNA, 20 nt, synthetic construct
  source 1..20: mol_type = other RNA
gagtactacactcagcagca

SEQ ID NO: 876 - RNA, 20 nt, synthetic construct
  source 1..20: mol_type = other RNA
tcacgcacaagaaacgtcca

SEQ ID NO: 877 - RNA, 20 nt, synthetic construct
  source 1..20: mol_type = other RNA
aggtctcggtgaaaccacct

SEQ ID NO: 878 - RNA, 20 nt, synthetic construct
  source 1..20: mol_type = other RNA
agcattatccaaagagtccg

SEQ ID NO: 879 - RNA, 20 nt, synthetic construct
  source 1..20: mol_type = other RNA
atattaattcttaccagtgg

SEQ ID NO: 880 - RNA, 20 nt, synthetic construct
  source 1..20: mol_type = other RNA
agctttaaatcaaggttcat

SEQ ID NO: 881 - RNA, 20 nt, synthetic construct
  source 1..20: mol_type = other RNA
atcccgagccctaaggtgca

SEQ ID NO: 882 - RNA, 20 nt, synthetic construct
  source 1..20: mol_type = other RNA
ggcagcgcggaggacagcgt

SEQ ID NO: 883 - RNA, 20 nt, synthetic construct
  source 1..20: mol_type = other RNA
ctcagggggctactaccacc

SEQ ID NO: 884 - RNA, 20 nt, synthetic construct
  source 1..20: mol_type = other RNA
gtcaccgacgagaccagaag

SEQ ID NO: 885 - RNA, 20 nt, synthetic construct
  source 1..20: mol_type = other RNA
gtcgtggacttcgtactgct

SEQ ID NO: 886 - RNA, 20 nt, synthetic construct
  source 1..20: mol_type = other RNA
taatttttaggcaagtgtcg

SEQ ID NO: 887 - RNA, 20 nt, synthetic construct
  source 1..20: mol_type = other RNA
ttagctgttagacttgaata

SEQ ID NO: 888 - RNA, 20 nt, synthetic construct
  source 1..20: mol_type = other RNA
cgagagccgtcaacttgcgt

SEQ ID NO: 889 - RNA, 20 nt, synthetic construct
  source 1..20: mol_type = other RNA
cggcttcaactgcaaaggtg

SEQ ID NO: 890 - RNA, 20 nt, synthetic construct
  source 1..20: mol_type = other RNA
tatgaaaaagcagagcgact

SEQ ID NO: 891 - RNA, 20 nt, synthetic construct
  source 1..20: mol_type = other RNA
tctggcgggcgagctcacgc

SEQ ID NO: 892 - RNA, 20 nt, synthetic construct
  source 1..20: mol_type = other RNA
ctcacgctggttaccgccta

SEQ ID NO: 893 - RNA, 20 nt, synthetic construct
  source 1..20: mol_type = other RNA
aaagattacgaacttccctg

SEQ ID NO: 894 - RNA, 20 nt, synthetic construct
  source 1..20: mol_type = other RNA
gttaaaaacagacatgccta

SEQ ID NO: 895 - RNA, 20 nt, synthetic construct
  source 1..20: mol_type = other RNA
atgcctaaggaggttgtacc

SEQ ID NO: 896 - RNA, 20 nt, synthetic construct
  source 1..20: mol_type = other RNA
ctccaggtatcccatcgaaa

SEQ ID NO: 897 - RNA, 20 nt, synthetic construct
  source 1..20: mol_type = other RNA
caccaaatacgatagatcag

SEQ ID NO: 898 - RNA, 20 nt, synthetic construct
  source 1..20: mol_type = other RNA
tggcggcgtgaatggcaaga

SEQ ID NO: 899 - RNA, 20 nt, synthetic construct
  source 1..20: mol_type = other RNA
taggatggtagcacacaacc

SEQ ID NO: 900 - RNA, 20 nt, synthetic construct
  source 1..20: mol_type = other RNA
cagcagcagagccccgacgg

SEQ ID NO: 901 - RNA, 20 nt, synthetic construct
  source 1..20: mol_type = other RNA
cggcgtgcgaacggaatgtg

SEQ ID NO: 902 - RNA, 20 nt, synthetic construct
  source 1..20: mol_type = other RNA
tatagacgctgcccgacgtc

SEQ ID NO: 903 - RNA, 20 nt, synthetic construct
  source 1..20: mol_type = other RNA
tccaaagaagggtactgtgg

SEQ ID NO: 904 - RNA, 20 nt, synthetic construct
  source 1..20: mol_type = other RNA
acagtacccttctttggaat

SEQ ID NO: 905 - RNA, 20 nt, synthetic construct
  source 1..20: mol_type = other RNA
gcgacgggcgcatctacgtg

SEQ ID NO: 906 - RNA, 20 nt, synthetic construct
  source 1..20: mol_type = other RNA
cccgacctccataagtcctg

SEQ ID NO: 907 - RNA, 20 nt, synthetic construct
  source 1..20: mol_type = other RNA
ggggtcctcgaagcgcacga

SEQ ID NO: 908 - RNA, 20 nt, synthetic construct
  source 1..20: mol_type = other RNA
tgctctgtttagaagatgac

SEQ ID NO: 909 - RNA, 20 nt, synthetic construct
  source 1..20: mol_type = other RNA
atattcttttctagttaaag

SEQ ID NO: 910 - RNA, 20 nt, synthetic construct
  source 1..20: mol_type = other RNA
cctgtaaagaaacaaaagac

SEQ ID NO: 911 - RNA, 20 nt, synthetic construct
  source 1..20: mol_type = other RNA
tggagaaagacgtaacttcg

SEQ ID NO: 912 - RNA, 20 nt, synthetic construct
  source 1..20: mol_type = other RNA
tctgccctgaggtatgcgat

SEQ ID NO: 913 - RNA, 20 nt, synthetic construct
  source 1..20: mol_type = other RNA
attccgcttggtgaaaacga

SEQ ID NO: 914 - RNA, 20 nt, synthetic construct
  source 1..20: mol_type = other RNA
caggcacaatagaaacaacg

SEQ ID NO: 915 - RNA, 20 nt, synthetic construct
  source 1..20: mol_type = other RNA
ccatttgtaatgctgacttg

SEQ ID NO: 916 - RNA, 20 nt, synthetic construct
  source 1..20: mol_type = other RNA
ctgggtcacttgtgccgtgg

SEQ ID NO: 917 - RNA, 20 nt, synthetic construct
  source 1..20: mol_type = other RNA
gtcagggttctggatatctg

SEQ ID NO: 918 - RNA, 20 nt, synthetic construct
  source 1..20: mol_type = other RNA
tggatttagagtctctcagc

SEQ ID NO: 919 - RNA, 20 nt, synthetic construct
  source 1..20: mol_type = other RNA
ctgcggctgtggtccagctg

SEQ ID NO: 920 - RNA, 20 nt, synthetic construct
  source 1..20: mol_type = other RNA
acaaaactgtgctagacatg

SEQ ID NO: 921 - RNA, 20 nt, synthetic construct
  source 1..20: mol_type = other RNA
ttcttccccagcccaggtaa

SEQ ID NO: 922 - RNA, 20 nt, synthetic construct
  source 1..20: mol_type = other RNA
cgtcatgagcagattaaacc

SEQ ID NO: 923 - RNA, 20 nt, synthetic construct
  source 1..20: mol_type = other RNA
gagagcgcctgcgacccgag

SEQ ID NO: 924 - RNA, 20 nt, synthetic construct
  source 1..20: mol_type = other RNA
ccagcgggtgaagtacacca

SEQ ID NO: 925 - RNA, 20 nt, synthetic construct
  source 1..20: mol_type = other RNA
ggagcgcttttcgccgccag

SEQ ID NO: 926 - RNA, 20 nt, synthetic construct
  source 1..20: mol_type = other RNA
tgaggcctggaccttatgca

SEQ ID NO: 927 - RNA, 20 nt, synthetic construct
  source 1..20: mol_type = other RNA
cctggtggagtgaaccatga

SEQ ID NO: 928 - RNA, 20 nt, synthetic construct
  source 1..20: mol_type = other RNA
caagcacttaggttcccctg

SEQ ID NO: 929 - RNA, 20 nt, synthetic construct
  source 1..20: mol_type = other RNA
ggtctccctacaattcagcg

SEQ ID NO: 930 - RNA, 20 nt, synthetic construct
  source 1..20: mol_type = other RNA
cacagcgcgtgactgcaatg

SEQ ID NO: 931 - RNA, 20 nt, synthetic construct
  source 1..20: mol_type = other RNA
tctggggcaccaattctagg

SEQ ID NO: 932 - RNA, 20 nt, synthetic construct
  source 1..20: mol_type = other RNA
gagccatgcttggcttacga

SEQ ID NO: 933 - RNA, 20 nt, synthetic construct
  source 1..20: mol_type = other RNA
gtacaagtacttatctcatg

SEQ ID NO: 934 - RNA, 20 nt, synthetic construct
  source 1..20: mol_type = other RNA
gagataacaacataacaaca

SEQ ID NO: 935 - RNA, 20 nt, synthetic construct
  source 1..20: mol_type = other RNA
catattccatagtctttggg

SEQ ID NO: 936 - RNA, 20 nt, synthetic construct
  source 1..20: mol_type = other RNA
ctgccccttagcaacttagg

SEQ ID NO: 937 - RNA, 20 nt, synthetic construct
  source 1..20: mol_type = other RNA
tgtttaaaaatatgttgaca

SEQ ID NO: 938 - RNA, 20 nt, synthetic construct
  source 1..20: mol_type = other RNA
ccaggaatggaaactcacgc

SEQ ID NO: 939 - RNA, 20 nt, synthetic construct
  source 1..20: mol_type = other RNA
gaggccgctgaattaacccg

SEQ ID NO: 940 - RNA, 20 nt, synthetic construct
  source 1..20: mol_type = other RNA
atacacgcacacttgcagaa

SEQ ID NO: 941 - RNA, 20 nt, synthetic construct
  source 1..20: mol_type = other RNA
gagcagacagaaacccaggg

SEQ ID NO: 942 - RNA, 20 nt, synthetic construct
  source 1..20: mol_type = other RNA
tgagtctccaaacagaacag

SEQ ID NO: 943 - RNA, 20 nt, synthetic construct
  source 1..20: mol_type = other RNA
taatatcactgacttcacgg

SEQ ID NO: 944 - RNA, 20 nt, synthetic construct
  source 1..20: mol_type = other RNA
tacacacaatgtaagcagca

SEQ ID NO: 945 - RNA, 20 nt, synthetic construct
  source 1..20: mol_type = other RNA
gggagctcaattcgaaacca

SEQ ID NO: 946 - RNA, 20 nt, synthetic construct
  source 1..20: mol_type = other RNA
ttggacaggtgagacagtcg

SEQ ID NO: 947 - RNA, 20 nt, synthetic construct
  source 1..20: mol_type = other RNA
aagctcactcagatagtgtg

SEQ ID NO: 948 - RNA, 20 nt, synthetic construct
  source 1..20: mol_type = other RNA
caggagaaccaccttacacg

SEQ ID NO: 949 - RNA, 20 nt, synthetic construct
  source 1..20: mol_type = other RNA
ggacagaccctgattcacaa

SEQ ID NO: 950 - RNA, 20 nt, synthetic construct
  source 1..20: mol_type = other RNA
acatggcagtctatgaacag

SEQ ID NO: 951 - RNA, 20 nt, synthetic construct
  source 1..20: mol_type = other RNA
cctatagagagtactacttg

SEQ ID NO: 952 - RNA, 20 nt, synthetic construct
  source 1..20: mol_type = other RNA
ccaaccgggtcttcattacg

SEQ ID NO: 953 - RNA, 20 nt, synthetic construct
  source 1..20: mol_type = other RNA
tcaagcgtagagttccgagt

SEQ ID NO: 954 - RNA, 20 nt, synthetic construct
  source 1..20: mol_type = other RNA
tcatgcaattatggacccag

SEQ ID NO: 955 - RNA, 20 nt, synthetic construct
  source 1..20: mol_type = other RNA
cgggaaagtgactggccatg

SEQ ID NO: 956 - RNA, 20 nt, synthetic construct
  source 1..20: mol_type = other RNA
tgagattgaaatcaaatcgg

SEQ ID NO: 957 - RNA, 20 nt, synthetic construct
  source 1..20: mol_type = other RNA
tatgcaatattcatcacgcg

SEQ ID NO: 958 - RNA, 20 nt, synthetic construct
  source 1..20: mol_type = other RNA
aatgtgttaaatcaaatgca

SEQ ID NO: 959 - protein, 8 aa, synthetic construct
DYKDDDDK

SEQ ID NO: 960 - protein, 437 aa, Homo sapiens
MLQDPDSDQPLNSLDVKPLRKPRIPMETFRKVGIPIIIALLSLASIIIVVVLIKVILDKYYFLCGQPLHFIPRKQLCDGELDCPLGEDEEHCVKSFPEGPAVAVRLSKDRSTLQVLDSATGNWFSACFDNFTEALAETACRQMGYSSKPTFRAVEIGPDQDLDVVEITENSQELRMRNSSGPCLSGSLVSLHCLACGKSLKTPRVVGVEEASVDSWPWQVSIQYDKQHVCGGSILDPHWVLTAAHCFRKHTDVFNWKVRAGSDKLGSFPSLAVAKIIIIEFNPMYPKDNDIALMKLQFPLTFSGTVRPICLPFFDEELTPATPLWIIGWGFTKQNGGKMSDILLQASVQVIDSTRCNADDAYQGEVTEKMMCAGIPEGGVDTCQGDSGGPLMYQSDQWHVVGIVSWGYGCGGPSTPGVYTKVSAYLNWIYNVWKAEL

SEQ ID NO: 961 - DNA, 1311 bp, Homo sapiens
  source 1..1311: mol_type = unassigned DNA
atgctccaggacccagactccgaccagcctcttaactcacttgatgtcaagcccttgcgaaaacctcggattccaatggaaactttcagaaaagtgggtatcccgattatcatcgcgttgctcagcttggcctcaataatcattgtggtcgtattaatcaaagtgatcctggacaaatactactttctctgcggtcagcccttgcatttcatcccaaggaagcagctctgcgatggggagctggattgtcccttgggcgaagatgaggaacactgcgtcaaaagttttccagaagggcccgctgtcgcggtgcggctgagcaaggatcgctctaccctgcaagtgctggactccgcgaccgggaactggttcagtgcttgttttgacaatttcaccgaggccctggctgagacagcctgccgccagatggggtatagctccaaaccaacttttagagctgtggagattggaccggaccaggacctggacgttgtggaaatcacggagaactcccaagaactccgaatgagaaattctagtggaccttgtctgtctggctccctggtatctctacactgtctggcttgcggcaaatcacttaagacacccagggtggtcggagtggaggaggcctccgtggatagttggccttggcaagtctctattcaatacgataagcagcacgtgtgcggaggttcgatactcgatccgcactgggtcttgacagcagcccactgcttccggaaacatactgatgtttttaattggaaagttcgcgcagggtctgacaagctgggctcattcccaagcctggctgtcgcaaaaatcataattatcgagttcaaccctatgtacccgaaagacaacgacatcgcccttatgaaactgcaatttccgctaacattcagcggaaccgtccgaccaatttgcctgccctttttcgacgaagaattaacacccgcaacacctctgtggataatcggctggggctttactaagcagaacggcggcaagatgagtgacatactactacaagcaagtgtgcaagttattgatagtacccgttgtaatgccgatgatgcttaccaaggcgaagttacggagaagatgatgtgcgcagggattccagagggtggcgtggatacctgtcagggtgatagcggagggcccttaatgtatcagtccgaccagtggcatgtcgtggggatagttagctggggctacggatgtggaggccctagcactcccggcgtctataccaaggtgtcggcctatcttaattggatctataacgtgtggaaagccgagttg

SEQ ID NO: 962 - protein, 690 aa, Homo sapiens
MAPWPELGDAQPNPDKYLEGAAGQQPTAPDKSKETNKTDNTEAPVTKIELLPSYSTATLIDEPTEVDDPWNLPTLQDSGIKWSERDTKGKILCFFQGIGRLILLLGFLYFFVCSLDILSSAFQLVGGKMAGQFFSNSSIMSNPLLGLVIGVLVTVLVQSSSTSTSIVVSMVSSSLLTVRAAIPIIMGANIGTSITNTIVALMQVGDRSEFRRAFAGATVHDFFNWLSVLVLLPVEVATHYLEIITQLIVESFHFKNGEDAPDLLKVITKPFTKLIVQLDKKVISQIAMNDEKAKNKSLVKIWCKTFTNKTQINVTVPSTANCTSPSLCWTDGIQNWTMKNVTYKENIAKCQHIFVNFHLPDLAVGTILLILSLLVLCGCLIMIVKILGSVLKGQVATVIKKTINTDFPFPFAWLTGYLAILVGAGMTFIVQSSSVFTSALTPLIGIGVITIERAYPLTLGSNIGTTTTAILAALASPGNALRSSLQIALCHFFFNISGILLWYPIPFTRLPIRMAKGLGNISAKYRWFAVFYLIIFFFLIPLTVFGLSLAGWRVLVGVGVPVVFIIILVLCLRLLQSRCPRVLPKKLQNWNFLPLWMRSLKPWDAVVSKFTGCFQMRCCCCCRVCCRACCLLCDCPKCCRCSKCCEDLEEAQEGQDVPVKAPETFDNITISREAQGEVPASDSKTECTAL

SEQ ID NO: 963 - DNA, 2070 bp, Homo sapiens
  source 1..2070: mol_type = unassigned DNA
atggctccctggcctgaattgggagatgcccagcccaaccccgataagtacctcgaaggggccgcaggtcagcagcccactgcccctgataaaagcaaagagaccaacaaaacagataacactgaggcacctgtaaccaagattgaacttctgccgtcctactccacggctacactgatagatgagcccactgaggtggatgacccctggaacctacccactcttcaggactcggggatcaagtggtcagagagagacaccaaagggaagattctctgtttcttccaagggattgggagattgattttacttctcggatttctctactttttcgtgtgctccctggatattcttagtagcgccttccagctggttggaggaaaaatggcaggacagttcttcagcaacagctctattatgtccaaccctttgttggggctggtgatcggggtgctggtgaccgtcttggtgcagagctccagcacctcaacgtccatcgttgtcagcatggtgtcctcttcattgctcactgttcgggctgccatccccattatcatgggggccaacattggaacgtcaatcaccaacactattgttgcgctcatgcaggtgggagatcggagtgagttcagaagagcttttgcaggagccactgtccatgacttcttcaactggctgtccgtgttggtgctcttgcccgtggaggtggccacccattacctcgagatcataacccagcttatagtggagagcttccacttcaagaatggagaagatgccccagatcttctgaaagtcatcactaagcccttcacaaagctcattgtccagctggataaaaaagttatcagccaaattgcaatgaacgatgaaaaagcgaaaaacaagagtcttgtcaagatttggtgcaaaacttttaccaacaagacccagattaacgtcactgttccctcgactgctaactgcacctccccttccctctgttggacggatggcatccaaaactggaccatgaagaatgtgacctacaaggagaacatcgccaaatgccagcatatctttgtgaatttccacctcccggatcttgctgtgggcaccatcttgctcatactctccctgctggtcctctgtggttgcctgatcatgattgtcaagatcctgggctctgtgctcaaggggcaggtcgccactgtcatcaagaagaccatcaacactgatttcccctttccctttgcatggttgactggctacctggccatcctcgtcggggcaggcatgaccttcatcgtacagagcagctctgtgttcacgtcggccttgacccccctgattggaatcggcgtgataaccattgagagggcttatccactcacgctgggctccaacatcggcaccaccaccaccgccatcctggccgccttagccagccctggcaatgcattgaggagttcactccagatcgccctgtgccactttttcttcaacatctccggcatcttgctgtggtacccgatcccgttcactcgcctgcccatccgcatggccaaggggctgggcaacatctctgccaagtatcgctggttcgccgtcttctacctgatcatcttcttcttcctgatcccgctgacggtgtttggcctctcgctggccggctggcgggtgctggttggtgtcggggttcccgtcgtcttcatcatcatcctggtactgtgcctccgactcctgcagtctcgctgcccacgcgtcctgccgaagaaactccagaactggaacttcctgccgctgtggatgcgctcgctgaagccctgggatgccgtcgtctccaagttcaccggctgcttccagatgcgctgctgctgctgctgccgcgtgtgctgccgcgcgtgctgcttgctgtgtgactgccccaagtgctgccgctgcagcaagtgctgcgaggacttggaggaggcgcaggaggggcaggatgtccctgtcaaggctcctgagacctttgataacataaccattagcagagaggctcagggtgaggtccctgcctcggactcaaagaccgaatgcacggccttg

SEQ ID NO: 964 - RNA, 3696 nt, Homo sapiens
  source 1..3696: mol_type = mRNA
ctcttctcccgcgggttggtggacccgctcagtacggagttggggaagctctttcacttcggaggattgctcaacaaccatgctgggcatctggaccctcctacctctggttcttacgtctgttgctagattatcgtccaaaagtgttaatgcccaagtgactgacatcaactccaagggattggaattgaggaagactgttactacagttgagactcagaacttggaaggcctgcatcatgatggccaattctgccataagccctgtcctccaggtgaaaggaaagctagggactgcacagtcaatggggatgaaccagactgcgtgccctgccaagaagggaaggagtacacagacaaagcccatttttcttccaaatgcagaagatgtagattgtgtgatgaaggacatggcttagaagtggaaataaactgcacccggacccagaataccaagtgcagatgtaaaccaaactttttttgtaactctactgtatgtgaacactgtgacccttgcaccaaatgtgaacatggaatcatcaaggaatgcacactcaccagcaacaccaagtgcaaagaggaaggatccagatctaacttggggtggctttgtcttcttcttttgccaattccactaattgtttgggtgaagagaaaggaagtacagaaaacatgcagaaagcacagaaaggaaaaccaaggttctcatgaatctccaactttaaatcctgaaacagtggcaataaatttatctgatgttgacttgagtaaatatatcaccactattgctggagtcatgacactaagtcaagttaaaggctttgttcgaaagaatggtgtcaatgaagccaaaatagatgagatcaagaatgacaatgtccaagacacagcagaacagaaagttcaactgcttcgtaattggcatcaacttcatggaaagaaagaagcgtatgacacattgattaaagatctcaaaaaagccaatctttgtactcttgcagagaaaattcagactatcatcctcaaggacattactagtgactcagaaaattcaaacttcagaaatgaaatccaaagcttggtctagagtgaaaaacaacaaattcagttctgagtatatgcaattagtgtttgaaaagattcttaatagctggctgtaaatactgcttggttttttactgggtacattttatcatttattagcgctgaagagccaacatatttgtagatttttaatatctcatgattctgcctccaaggatgtttaaaatctagttgggaaaacaaacttcatcaagagtaaatgcagtggcatgctaagtacccaaataggagtgtatgcagaggatgaaagattaagattatgctctggcatctaacatatgattctgtagtatgaatgtaatcagtgtatgttagtacaaatgtctatccacaggctaaccccactctatgaatcaatagaagaagctatgaccttttgctgaaatatcagttactgaacaggcaggccactttgcctctaaattacctctgataattctagagattttaccatatttctaaactttgtttataactctgagaagatcatatttatgtaaagtatatgtatttgagtgcagaatttaaataaggctctacctcaaagacctttgcacagtttattggtgtcatattatacaatatttcaattgtgaattcacatagaaaacattaaattataatgtttgactattatatatgtgtatgcattttactggctcaaaactacctacttctttctcaggcatcaaaagcattttgagcaggagagtattactagagctttgccacctctccatttttgccttggtgctcatcttaatggcctaatgcacccccaaacatggaaatatcaccaaaaaatacttaatagtccaccaaaaggcaagactgcccttagaaattctagcctggtttggagatactaactgctctcagagaaagtagctttgtgacatgtcatgaacccatgtttgcaatcaaagatgataaaatagattcttatttttcccccacccccgaaaatgttcaataatgtcccatgtaaaacctgctacaaatggcagcttatacatagcaatggtaaaatcatcatctggatttaggaattgctcttgtcatacccccaagtttctaagatttaagattctccttactactatcctacgtttaaatatctttgaaagtttgtattaaatgtgaattttaagaaataatatttatatttctgtaaatgtaaactgtgaagatagttataaactgaagcagatacctggaaccacctaaagaacttccatttatggaggatttttttgccccttgtgtttggaattataaaatataggtaaaagtacgtaattaaataatgtttttggtatttctggttttctcttttttggtaggggcttgctttttggttttgtcttccttttctctaactgatgctaaatataacttgtctttaatgcttcttggatcccttagaaggtacttcctttttaaccttaacccttttagtagttaaataattatttccataggttgctattgccaagaagacctcttccaaacagcacatgattattcgtcaaacagtttcgtattccagatactggaatgtggataagaaagtatacatttcaaggggtaggttttattattaagaaagccaaatgaggattttgaaatattctttcctgcatattatccattctagctacatgctggccagtgggccacctttcttttctgcaatttaatgctagtaatatattctatttaacccatgagtcccaaagtattagcatttcaacatgtaagcatgtcggtaagatagttgtgctttgcttagggttccctcctgtgttatggtctggaaagtgtctttaggcagaaagtctgagtgatcacagggttcactcattaatttctcttttctgagccatcatagtctgtgctgtctgctctccagttttctatttctagacagaagtagggcaagttaggtactagttattcttcatggccagaagtgcaagttctactttgcaagacaagattaagttagagaacaccctattccactttggtgaactcagagcaagaactttgagttcctttgggaggaagacagtggagaagtctttgtacttggtgatgtggtttttttcctcatggcttcacctagtggccccaagcatgacttctcccatgtcaatgagcacagccacattcccgagttgaggtgaccccacggtccagaatcatcctcattctggtgaacctggttctctttgtggtgggcatactgggtaggagaatcacccaaaggtcacccatgagctgcagaaaaaaaggctatttgcagaaggagctcacagatcacattgaaagcattgcatattcaaacatcttggtcttctttattggcatgcccacagggtcttctgacctctgattagatcagacactttttagatattgaatcatcagtttctgtacaactatctgaataaggtatataatcaatgaaatttagaatttttttctatgcttactcctgattggtaatttgtttgggtttagaattctatacaaggccatttgtaattttcctcagcactttaaaaatattaaaccatgttttcttaa

SEQ ID NO: 965 - DNA, 4530 bp, Homo sapiens
  source 1..4530: mol_type = unassigned DNA
actcgcgcgcacggagcgacgacacccccgcgcgtgcacccgctcgggacaggagccggactcctgtgcagcttccctcggccgccgggggcctccccgcgcctcgccggcctccaggccccctcctggctggcgagcgggcgccacatctggcccgcacatctgcgctgccggcccggcgcggggtccggagagggcgcggcgcggaggcgcagccaggggtccgggaaggcgccgtccgctgcgctgggggctcggtctatgacgagcagcggggtctgccatgggtcgggggctgctcaggggcctgtggccgctgcacatcgtcctgtggacgcgtatcgccagcacgatcccaccgcacgttcagaagtcggttaataacgacatgatagtcactgacaacaacggtgcagtcaagtttccacaactgtgtaaattttgtgatgtgagattttccacctgtgacaaccagaaatcctgcatgagcaactgcagcatcacctccatctgtgagaagccacaggaagtctgtgtggctgtatggagaaagaatgacgagaacataacactagagacagtttgccatgaccccaagctcccctaccatgactttattctggaagatgctgcttctccaaagtgcattatgaaggaaaaaaaaaagcctggtgagactttcttcatgtgttcctgtagctctgatgagtgcaatgacaacatcatcttctcagaagaatataacaccagcaatcctgacttgttgctagtcatatttcaagtgacaggcatcagcctcctgccaccactgggagttgccatatctgtcatcatcatcttctactgctaccgcgttaaccggcagcagaagctgagttcaacctgggaaaccggcaagacgcggaagctcatggagttcagcgagcactgtgccatcatcctggaagatgaccgctctgacatcagctccacgtgtgccaacaacatcaaccacaacacagagctgctgcccattgagctggacaccctggtggggaaaggtcgctttgctgaggtctataaggccaagctgaagcagaacacttcagagcagtttgagacagtggcagtcaagatctttccctatgaggagtatgcctcttggaagacagagaaggacatcttctcagacatcaatctgaagcatgagaacatactccagttcctgacggctgaggagcggaagacggagttggggaaacaatactggctgatcaccgccttccacgccaagggcaacctacaggagtacctgacgcggcatgtcatcagctgggaggacctgcgcaagctgggcagctccctcgcccgggggattgctcacctccacagtgatcacactccatgtgggaggcccaagatgcccatcgtgcacagggacctcaagagctccaatatcctcgtgaagaacgacctaacctgctgcctgtgtgactttgggctttccctgcgtctggaccctactctgtctgtggatgacctggctaacagtgggcaggtgggaactgcaagatacatggctccagaagtcctagaatccaggatgaatttggagaatgttgagtccttcaagcagaccgatgtctactccatggctctggtgctctgggaaatgacatctcgctgtaatgcagtgggagaagtaaaagattatgagcctccatttggttccaaggtgcgggagcacccctgtgtcgaaagcatgaaggacaacgtgttgagagatcgagggcgaccagaaattcccagcttctggctcaaccaccagggcatccagatggtgtgtgagacgttgactgagtgctgggaccacgacccagaggcccgtctcacagcccagtgtgtggcagaacgcttcagtgagctggagcatctggacaggctctcggggaggagctgctcggaggagaagattcctgaagacggctccctaaacactaccaaatagctcttctggggcaggctgggccatgtccaaagaggctgcccctctcaccaaagaacagaggcagcaggaagctgcccctgaactgatgcttcctggaaaaccaagggggtcactcccctccctgtaagctgtggggataagcagaaacaacagcagcagggagtgggtgacatagagcattctatgcctttgacattgtcataggataagctgtgttagcacttcctcaggaaatgagattgatttttacaatagccaataacatttgcactttattaatgcctgtatataaatatgaatagctatgttttatatatatatatatatatctatatatgtctatagctctatatatatagccataccttgaaaagagacaaggaaaaacatcaaatattcccaggaaattggttttattggagaactccagaaccaagcagagaaggaagggacccatgacagcattagcatttgacaatcacacatgcagtggttctctgactgtaaaacagtgaactttgcatgaggaaagaggctccatgtctcacagccagctatgaccacattgcacttgcttttgcaaaataatcattccctgcctagcacttctcttctggccatggaactaagtacagtggcactgtttgaggaccagtgttcccggggttcctgtgtgcccttatttctcctggacttttcatttaagctccaagccccaaatctggggggctagtttagaaactctccctcaacctagtttagaaactctaccccatctttaataccttgaatgttttgaaccccactttttaccttcatgggttgcagaaaaatcagaacagatgtccccatccatgcgattgccccaccatctactaatgaaaaattgttctttttttcatctttcccctgcacttatgttactattctctgctcccagccttcatccttttctaaaaaggagcaaattctcactctaggctttatcgtgtttactttttcattacacttgacttgattttctagttttctatacaaacaccaatgggttccatctttctgggctcctgattgctcaagcacagtttggcctgatgaagaggatttcaactacacaatactatcattgtcaggactatgacctcaggcactctaaacatatgttttgtttggtcagcacagcgtttcaaaaagtgaagccactttataaatatttggagattttgcaggaaaatctggatccccaggtaaggatagcagatggttttcagttatctccagtccacgttcacaaaatgtgaaggtgtggagacacttacaaagctgcctcacttctcactgtaaacattagctctttccactgcctacctggaccccagtctaggaattaaatctgcacctaaccaaggtcccttgtaagaaatgtccattcaagcagtcattctctgggtatataatatgattttgactaccttatctggtgttaagatttgaagttggccttttattggactaaaggggaactcctttaagggtctcagttagcccaagtttcttttgcttatatgttaatagttttaccctctgcattggagagaggagtgctttactccaagaagctttcctcatggttaccgttctctccatcatgccagccttctcaacctttgcagaaattactagagaggatttgaatgtgggacacaaaggtcccatttgcagttagaaaatttgtgtccacaaggacaagaacaaagtatgagctttaaaactccataggaaacttgttaatcaacaaagaagtgttaatgctgcaagtaatctcttttttaaaactttttgaagctacttattttcagccaaataggaatattagagagggactggtagtgagaatatcagctctgtttggatggtggaaggtctcattttattgagatttttaagatacatgcaaaggtttggaaatagaacctctaggcaccctcctcagtgtgggtgggctgagagttaaagacagtgtggctgcagtagcatagaggcgcctagaaattccacttgcaccgtagggcatgctgataccatcccaatagctgttgcccattgacctctagtggtgagtttctagaatactggtccattcatgagatattcaagattcaagagtattctcacttctgggttatcagcataaactggaatgtagtgtcagaggatactgtggcttgttttgtttatgtttttttttcttattcaagaaaaaagaccaaggaataacattctgtagttcctaaaaatactgacttttttcactactatacataaagggaaagttttattcttttatggaacacttcagctgtactcatgtattaaaataggaatgtgaatgctatatactctttttatatcaaaagtctcaagcacttatttttattctatgcattgtttgtcttttacataaataaaatgtttattagattgaataaagcaaaatactcaggtgagcatcctgcctcctgttcccattcctagtagctaaa

SEQ ID NO: 966 - RNA, 3470 nt, Homo sapiens
  source 1..3470: mol_type = mRNA
gcatgcgccgcagcgccagcgctctccccggatcgtgcggggcctgagcctctccgccggcgcaggctctgctcgcgccagctcgctcccgcagccatgcccaccaccatcgagcgggagttcgaagagttggatactcagcgtcgctggcagccgctgtacttggaaattcgaaatgagtcccatgactatcctcatagagtggccaagtttccagaaaacagaaatcgaaacagatacagagatgtaagcccatatgatcacagtcgtgttaaactgcaaaatgctgagaatgattatattaatgccagtttagttgacatagaagaggcacaaaggagttacatcttaacacagggtccacttcctaacacatgctgccatttctggcttatggtttggcagcagaagaccaaagcagttgtcatgctgaaccgcattgtggagaaagaatcggttaaatgtgcacagtactggccaacagatgaccaagagatgctgtttaaagaaacaggattcagtgtgaagctcttgtcagaagatgtgaagtcgtattatacagtacatctactacaattagaaaatatcaatagtggtgaaaccagaacaatatctcactttcattatactacctggccagattttggagtccctgaatcaccagcttcatttctcaatttcttgtttaaagtgagagaatctggctccttgaaccctgaccatgggcctgcggtgatccactgtagtgcaggcattgggcgctctggcaccttctctctggtagacacttgtcttgttttgatggaaaaaggagatgatattaacataaaacaagtgttactgaacatgagaaaataccgaatgggtcttattcagaccccagatcaactgagattctcatacatggctataatagaaggagcaaaatgtataaagggagattctagtatacagaaacgatggaaagaactttctaaggaagacttatctcctgcctttgatcattcaccaaacaaaataatgactgaaaaatacaatgggaacagaataggtctagaagaagaaaaactgacaggtgaccgatgtacaggactttcctctaaaatgcaagatacaatggaggagaacagtgagagtgctctacggaaacgtattcgagaggacagaaaggccaccacagctcagaaggtgcagcagatgaaacagaggctaaatgagaatgaacgaaaaagaaaaaggtggttatattggcaacctattctcactaagatggggtttatgtcagtcattttggttggcgcttttgttggctggacactgttttttcagcaaaatgccctataaacaattaattttgcccagcaagcttctgcactagtaactgacagtgctacattaatcataggggtttgtctgcagcaaacgcctcatatcccaaaaacggtgcagtagaatagacatcaaccagataagtgatatttacagtcacaagcccaacatctcaggactcttgactgcaggttcctctgaaccccaaactgtaaatggctgtctaaaataaagacattcatgtttgttaaaaactggtaaattttgcaactgtattcatacatgtcaaacacagtatttcacctgaccaacattgagatatcctttatcacaggatttgtttttggaggctatctggattttaacctgcacttgatataagcaataaatattgtggttttatctacgttattggaaagaaaatgacatttaaataatgtgtgtaatgtataatgtactattgacatgggcatcaacacttttattcttaagcatttcagggtaaatatattttataagtatctatttaatcttttgtagttaactgtactttttaagagctcaatttgaaaaatctgttactaaaaaaataaattgtatgtcgattgaattgtactggatacattttccatttttctaaagagaagtttgatatgagcagttagaagttggaataagcaatttctactatatattgcatttcttttatgttttacagttttccccattttaaaaagaaaagcaaacaaagaaacaaaagtttttcctaaaaatatctttgaaggaaaattctccttactgggatagtcaggtaaacagttggtcaagactttgtaaagaaattggtttctgtaaatcccattattgatatgtttatttttcatgaaaatttcaatgtagttggggtagattatgatttaggaagcaaaagtaagaagcagcattttatgattcataatttcagtttactagactgaagttttgaagtaaacacttttcagtttctttctacttcaataaatagtatgattatatgcaaaccttacattgtcattttaacttaatgaatattttttaaagcaaactgtttaatgaatttaactgctcatttgaatgctagctttcctcagatttcaacattccattcagtgtttaatttgtcttacttaaacttgaaattgttgttacaaatttaattgctaggaggcatggatagcatacattattatggatagcataccttatttcagtggttttcaaactatgctcattggatgtccaggtgggtcaagaggttactttcaaccacagcatctctgccttgtctctttatatgccacataagatttctgcataaggcttaagtattttaaagggggcagttatcatttaaaaacagtttggtcgggcgcggtggctcatgcctgtaatcccagcactttgggaggctgaagtgggcagatcacctgaggtcaggagttcaagaccagcctggccaacgtggtgaaacaccatctctactaaaaatgcaaaaattagctgggcatggtggagggcacctgtaatctcagctactcaggaggctgaggtaggagaattgcttgaacccaggagatggaggttgcagtgagctgagatcacgtcactgcactccagccagggcgacagagcgagactccatctcaaaagaaacaaacaaaaaaaacagtttgggccgggtgtggtggctcacgcttgtaatcccagcacttcggaaggccaaggcgggcggatcacgaggtcaagagatggagactgtcctggccaacatggtgaaatcccttctttactaaaaatacaaaaattatctgggcgtggtggtgcatgcctgtagtcccagctccttgggaggctaaggcaggagaatcacttgaacccgggaggcagaggttgcagtgagccgagattgcaccactgcactccagcctggcaacagagcaagacttcgtctcaaaaaaaaaaaaaaaaaaagtttgaaaaccattggtatagatagatattttgaattgatttgcatagtctccttgaatgtgttaaattatgttgaaagtatgaaagcaggatgtaggtggtactacatattaaataagatttatataaca

SEQ ID NO: 967 - DNA, 22 bp, synthetic construct
  source 1..22: mol_type = other DNA
ttaagaatcttttcaaacacta

SEQ ID NO: 968 - DNA, 22 bp, synthetic construct
  source 1..22: mol_type = other DNA
tctgacaagagcttcacactga

SEQ ID NO: 969 - DNA, 22 bp, synthetic construct
  source 1..22: mol_type = other DNA
ttatgtaaaagacaaacaatgc

SEQ ID NO: 970 - DNA, 22 bp, synthetic construct
  source 1..22: mol_type = other DNA
taaaaatcaatctcatttcctg

SEQ ID NO: 971 - DNA, 638 bp, synthetic construct
  source 1..638: mol_type = other DNA
gtaagtcgactcgttggatccccactacccggatcaacgccctaggtttatgtttggatgaactgacatacgcgtatccgtcttaagaatcttttcaaacactagtagtgaaatatatattaaactagtgtttgaaaagattcttattacggtaacgcggaattcgcaactattttatcaattttttgcgtcgacgacggtgacttaggagtatgccggatcaacgccctaggtttatgtttggatgaactgacatacgcgtatccgtctaaaaatcaatctcatttcctggtagtgaaatatatattaaaccaggaaatgagattgatttttttacggtaacgcggaattcgcaactattttatcaattttttgcgtcgacgactgtgacagcagagtatgccggatcaacgccctaggtttatgtttggatgaactgacatacgcgtatccgtcttatgtaaaagacaaacaatgcgtagtgaaatatatattaaacgcattgtttgtcttttacatattacggtaacgcggaattcgcaactattttatcaattttttgcgtcgaccggaactatcttgaagagtagtagtggactagtgtgacgctgctgacccctttctttcccttctacaga

SEQ ID NO: 972 - DNA, 1019 bp, synthetic construct
  source 1..1019: mol_type = other DNA
gtaagtcgactcgttggatccccactacccggatcaacgccctaggtttatgtttggatgaactgacatacgcgtatccgtcttaagaatcttttcaaacactagtagtgaaatatatattaaactagtgtttgaaaagattcttattacggtaacgcggaattcgcaactattttatcaattttttgcgtcgacacttcaaggggcttgcggccgcaaccatctccatggctgtttgaatgaggcttcagtactttacagaatcgttgcctgcacatcttggaaacacttgctgggattacttcgacttcttaacccaacagaaggctcgagaaggtatattgctgttgacagtgagcgccagtgtgaagctcttgtcagatagtgaagccacagatgtatctgacaagagcttcacactgatgcctactgcctcggacttcaaggggctagaattcgagcaattatcttgtttactaaaactgaataccttgctatctctttgatacatttttacaaagctgaattaaaatggtataaattaaatcactttgacggtgacttaggagtatgccggatcaacgccctaggtttatgtttggatgaactgacatacgcgtatccgtctaaaaatcaatctcatttcctggtagtgaaatatatattaaaccaggaaatgagattgatttttttacggtaacgcggaattcgcaactattttatcaattttttgcgtcgacgactgtgacagcagagtatgccggatcaacgccctaggtttatgtttggatgaactgacatacgcgtatccgtcttatgtaaaagacaaacaatgcgtagtgaaatatatattaaacgcattgtttgtcttttacatattacggtaacgcggaattcgcaactattttatcaattttttgcgtcgaccggaactatcttgaagagtagtagtggactagtgtgacgctgctgacccctttctttcccttctacagatccaagctgtgaccggcgcctac

SEQ ID NO: 973 - DNA, 613 bp, synthetic construct
  source 1..613: mol_type = other DNA
gtaagtcgactcgttggatccccactacccggatcaacgccctaggtttatgtttggatgaactgacatacgcgtatccgtcttaagaatcttttcaaacactagtagtgaaatatatattaaactagtgtttgaaaagattcttattacggtaacgcggaattcgcaactattttatcaattttttgcgtcgacacttcaaggggcttgcggccgcaaccatctccatggctgtttgaatgaggcttcagtactttacagaatcgttgcctgcacatcttggaaacacttgctgggattacttcgacttcttaacccaacagaaggctcgagaaggtatattgctgttgacagtgagcgccagtgtgaagctcttgtcagatagtgaagccacagatgtatctgacaagagcttcacactgatgcctactgcctcggacttcaaggggctagaattcgagcaattatcttgtttactaaaactgaataccttgctatctctttgatacatttttacaaagctgaattaaaatggtataaattaaatcactttttcatctgaccagtagtggactagtgtgacgctgctgacccctttctttcccttctacag

SEQ ID NO: 974 - DNA, 354 bp, synthetic construct
  source 1..354: mol_type = other DNA
ccggatcaacgccctaggtttatgtttggatgaactgacatacgcgtatccgtctaaaaatcaatctcatttcctggtagtgaaatatatattaaaccaggaaatgagattgatttttttacggtaacgcggaattcgcaactattttatcaattttttgcgtcgacgactgtgacagcagagtatgccggatcaacgccctaggtttatgtttggatgaactgacatacgcgtatccgtcttatgtaaaagacaaacaatgcgtagtgaaatatatattaaacgcattgtttgtcttttacatattacggtaacgcggaattcgcaactattttatcaattttttgcgtcgac

SEQ ID NO: 975 - DNA, 906 bp, synthetic construct
  source 1..906: mol_type = other DNA
ccactacccggatcaacgccctaggtttatgtttggatgaactgacatacgcgtatccgtcttaagaatcttttcaaacactagtagtgaaatatatattaaactagtgtttgaaaagattcttattacggtaacgcggaattcgcaactattttatcaattttttgcgtcgacacttcaaggggcttgcggccgcaaccatctccatggctgtttgaatgaggcttcagtactttacagaatcgttgcctgcacatcttggaaacacttgctgggattacttcgacttcttaacccaacagaaggctcgagaaggtatattgctgttgacagtgagcgccagtgtgaagctcttgtcagatagtgaagccacagatgtatctgacaagagcttcacactgatgcctactgcctcggacttcaaggggctagaattcgagcaattatcttgtttactaaaactgaataccttgctatctctttgatacatttttacaaagctgaattaaaatggtataaattaaatcactttgacggtgacttaggagtatgccggatcaacgccctaggtttatgtttggatgaactgacatacgcgtatccgtctaaaaatcaatctcatttcctggtagtgaaatatatattaaaccaggaaatgagattgatttttttacggtaacgcggaattcgcaactattttatcaattttttgcgtcgacgactgtgacagcagagtatgccggatcaacgccctaggtttatgtttggatgaactgacatacgcgtatccgtcttatgtaaaagacaaacaatgcgtagtgaaatatatattaaacgcattgtttgtcttttacatattacggtaacgcggaattcgcaactattttatcaattttttgcgtcgac

SEQ ID NO: 976 - DNA, 1541 bp, synthetic construct
  source 1..1541: mol_type = other DNA
ggatctgcgatcgctccggtgcccgtcagtgggcagagcgcacatcgcccacagtccccgagaagttggggggaggggtcggcaattgaacgggtgcctagagaaggtggcgcggggtaaactgggaaagtgatgtcgtgtactggctccgcctttttcccgagggtgggggagaaccgtatataagtgcagtagtcgccgtgaacgttctttttcgcaacgggtttgccgccagaacacagctgaagcttcgaggggctcgcatctctccttcacgcgcccgccgccctacctgaggccgccatccacgccggttgagtcgcgttctgccgcctcccgcctgtggtgcctcctgaactgcgtccgccgtctaggtaagtcgactcgttggatccccactacccggatcaacgccctaggtttatgtttggatgaactgacatacgcgtatccgtcttaagaatcttttcaaacactagtagtgaaatatatattaaactagtgtttgaaaagattcttattacggtaacgcggaattcgcaactattttatcaattttttgcgtcgacgacggtgacttaggagtatgccggatcaacgccctaggtttatgtttggatgaactgacatacgcgtatccgtctaaaaatcaatctcatttcctggtagtgaaatatatattaaaccaggaaatgagattgatttttttacggtaacgcggaattcgcaactattttatcaattttttgcgtcgacgactgtgacagcagagtatgccggatcaacgccctaggtttatgtttggatgaactgacatacgcgtatccgtcttatgtaaaagacaaacaatgcgtagtgaaatatatattaaacgcattgtttgtcttttacatattacggtaacgcggaattcgcaactattttatcaattttttgcgtcgaccggaactatcttgaagagtagtagtggactagtgtgacgctgctgacccctttctttcccttctacagatccaagctgtgaccggcgcctacacctgcagcccaagcttacctaaaggacgggtggcatccctgtgacccctccccagtgcctctcctggccctggaagttgccactccagtgcccaccagccttgtcctaataaaattaagttgcatcattttgtctgactaggtgtccttctataatattatggggtggaggggggtggtatggagcaaggggcaagttgggaagacaacctgtagggcctgcggggtctattgggaaccaagctggagtgcagtggcacaatcttggctcactgcaatctccgcctcctgggttcaagcgattctcctgcctcagcctcccgagttgttgggattccaggcatgcatgaccaggctcagctaatttttgtttttttggtagaaacggggtttcaccatattggccaggctggtctccaactcctaatctcaggtgatctacccaccttggcctcccaaattgctgggattacaggcgtgaaccactgctcccttccctgtccttc

SEQ ID NO: 977 - DNA, 1055 bp, synthetic construct
  source 1..1055: mol_type = other DNA
ggatctgcgatcgctccggtgcccgtcagtgggcagagcgcacatcgcccacagtccccgagaagttggggggaggggtcggcaattgaacgggtgcctagagaaggtggcgcggggtaaactgggaaagtgatgtcgtgtactggctccgcctttttcccgagggtgggggagaaccgtatataagtgcagtagtcgccgtgaacgttctttttcgcaacgggtttgccgccagaacacagctgaagcttcgaggggctcgcatctctccttcacgcgcccgccgccctacctgaggccgccatccacgccggttgagtcgcgttctgccgcctcccgcctgtggtgcctcctgaactgcgtccgccgtctaggtaagtcgactcgttggatccccactacccggatcaacgccctaggtttatgtttggatgaactgacatacgcgtatccgtcttaagaatcttttcaaacactagtagtgaaatatatattaaactagtgtttgaaaagattcttattacggtaacgcggaattcgcaactattttatcaattttttgcgtcgacgacggtgacttaggagtatgccggatcaacgccctaggtttatgtttggatgaactgacatacgcgtatccgtctaaaaatcaatctcatttcctggtagtgaaatatatattaaaccaggaaatgagattgatttttttacggtaacgcggaattcgcaactattttatcaattttttgcgtcgacgactgtgacagcagagtatgccggatcaacgccctaggtttatgtttggatgaactgacatacgcgtatccgtcttatgtaaaagacaaacaatgcgtagtgaaatatatattaaacgcattgtttgtcttttacatattacggtaacgcggaattcgcaactattttatcaattttttgcgtcgaccggaactatcttgaagagtagtagtggactagtgtgacgctgctgacccctttctttcccttctacagatccaagctgtgaccggcgcctacacctgcagcccaagcttacc

SEQ ID NO: 978 - DNA, 486 bp, synthetic construct
  source 1..486: mol_type = other DNA
taaaggacgggtggcatccctgtgacccctccccagtgcctctcctggccctggaagttgccactccagtgcccaccagccttgtcctaataaaattaagttgcatcattttgtctgactaggtgtccttctataatattatggggtggaggggggtggtatggagcaaggggcaagttgggaagacaacctgtagggcctgcggggtctattgggaaccaagctggagtgcagtggcacaatcttggctcactgcaatctccgcctcctgggttcaagcgattctcctgcctcagcctcccgagttgttgggattccaggcatgcatgaccaggctcagctaatttttgtttttttggtagaaacggggtttcaccatattggccaggctggtctccaactcctaatctcaggtgatctacccaccttggcctcccaaattgctgggattacaggcgtgaaccactgctcccttccctgtccttc

SEQ ID NO: 979 - DNA, 1578 bp, synthetic construct
  source 1..1578: mol_type = other DNA
ggatctgcgatcgctccggtgcccgtcagtgggcagagcgcacatcgcccacagtccccgagaagttggggggaggggtcggcaattgaacgggtgcctagagaaggtggcgcggggtaaactgggaaagtgatgtcgtgtactggctccgcctttttcccgagggtgggggagaaccgtatataagtgcagtagtcgccgtgaacgttctttttcgcaacgggtttgccgccagaacacagctgaagcttcgaggggctcgcatctctccttcacgcgcccgccgccctacctgaggccgccatccacgccggttgagtcgcgttctgccgcctcccgcctgtggtgcctcctgaactgcgtccgccgtctaggtaagtcgactcgttggatccccactacccggatcaacgccctaggtttatgtttggatgaactgacatacgcgtatccgtctaaaaatcaatctcatttcctggtagtgaaatatatattaaaccaggaaatgagattgatttttttacggtaacgcggaattcgcaactattttatcaattttttgcgtcgacacttcaaggggcttgcggccgcaaccatctccatggcgacggtgacttaggagtatgccggatcaacgccctaggtttatgtttggatgaactgacatacgcgtatccgtcttatgtaaaagacaaacaatgcgtagtgaaatatatattaaacgcattgtttgtcttttacatattacggtaacgcggaattcgcaactattttatcaattttttgcgtcgacgactgtgacagcagagtatgccggatcaacgccctaggtttatgtttggatgaactgacatacgcgtatccgtcttaagaatcttttcaaacactagtagtgaaatatatattaaactagtgtttgaaaagattcttattacggtaacgcggaattcgcaactattttatcaattttttgcgtcgaccggaactatcttgaagagtagtagtggactagtgtgacgctgctgacccctttctttcccttctacagatccaagctgtgaccggcgcctacacctgcagcccaagcttacctaaaggacgggtggcatccctgtgacccctccccagtgcctctcctggccctggaagttgccactccagtgcccaccagccttgtcctaataaaattaagttgcatcattttgtctgactaggtgtccttctataatattatggggtggaggggggtggtatggagcaaggggcaagttgggaagacaacctgtagggcctgcggggtctattgggaaccaagctggagtgcagtggcacaatcttggctcactgcaatctccgcctcctgggttcaagcgattctcctgcctcagcctcccgagttgttgggattccaggcatgcatgaccaggctcagctaatttttgtttttttggtagaaacggggtttcaccatattggccaggctggtctccaactcctaatctcaggtgatctacccaccttggcctcccaaattgctgggattacaggcgtgaaccactgctcccttccctgtccttc

SEQ ID NO: 980 - DNA, 1092 bp, synthetic construct
  source 1..1092: mol_type = other DNA
ggatctgcgatcgctccggtgcccgtcagtgggcagagcgcacatcgcccacagtccccgagaagttggggggaggggtcggcaattgaacgggtgcctagagaaggtggcgcggggtaaactgggaaagtgatgtcgtgtactggctccgcctttttcccgagggtgggggagaaccgtatataagtgcagtagtcgccgtgaacgttctttttcgcaacgggtttgccgccagaacacagctgaagcttcgaggggctcgcatctctccttcacgcgcccgccgccctacctgaggccgccatccacgccggttgagtcgcgttctgccgcctcccgcctgtggtgcctcctgaactgcgtccgccgtctaggtaagtcgactcgttggatccccactacccggatcaacgccctaggtttatgtttggatgaactgacatacgcgtatccgtctaaaaatcaatctcatttcctggtagtgaaatatatattaaaccaggaaatgagattgatttttttacggtaacgcggaattcgcaactattttatcaattttttgcgtcgacacttcaaggggcttgcggccgcaaccatctccatggcgacggtgacttaggagtatgccggatcaacgccctaggtttatgtttggatgaactgacatacgcgtatccgtcttatgtaaaagacaaacaatgcgtagtgaaatatatattaaacgcattgtttgtcttttacatattacggtaacgcggaattcgcaactattttatcaattttttgcgtcgacgactgtgacagcagagtatgccggatcaacgccctaggtttatgtttggatgaactgacatacgcgtatccgtcttaagaatcttttcaaacactagtagtgaaatatatattaaactagtgtttgaaaagattcttattacggtaacgcggaattcgcaactattttatcaattttttgcgtcgaccggaactatcttgaagagtagtagtggactagtgtgacgctgctgacccctttctttcccttctacagatccaagctgtgaccggcgcctacacctgcagcccaagcttacc

SEQ ID NO: 981 - DNA, 486 bp, synthetic construct; identical to SEQ ID NO: 978
  source 1..486: mol_type = other DNA

SEQ ID NO: 982 - DNA, 1732 bp, synthetic construct
  source 1..1732: mol_type = other DNA
ggatctgcgatcgctccggtgcccgtcagtgggcagagcgcacatcgcccacagtccccgagaagttggggggaggggtcggcaattgaacgggtgcctagagaaggtggcgcggggtaaactgggaaagtgatgtcgtgtactggctccgcctttttcccgagggtgggggagaaccgtatataagtgcagtagtcgccgtgaacgttctttttcgcaacgggtttgccgccagaacacagctgaagcttcgaggggctcgcatctctccttcacgcgcccgccgccctacctgaggccgccatccacgccggttgagtcgcgttctgccgcctcccgcctgtggtgcctcctgaactgcgtccgccgtctaggtaagtcgactcgttggatccccactacccggatcaacgccctaggtttatgtttggatgaactgacatacgcgtatccgtcttaagaatcttttcaaacactagtagtgaaatatatattaaactagtgtttgaaaagattcttattacggtaacgcggaattcgcaactattttatcaattttttgcgtcgacacttcaaggggcttgcggccgcaaccatctccatggcgacggtgacttaggagtatgtgtttgaatgaggcttcagtactttacagaatcgttgcctgcacatcttggaaacacttgctgggattacttcgacttcttaacccaacagaaggctcgagaaggtatattgctgttgacagtgagcgcaggaaatgagattgatttttttagtgaagccacagatgtataaaaatcaatctcatttcctgtgcctactgcctcggacttcaaggggctagaattcgagcaattatcttgtttactaaaactgaataccttgctatctctttgatacatttttacaaagctgaattaaaatggtataaattaaatcactttgactgtgacagcagagtatgccggatcaacgccctaggtttatgtttggatgaactgacatacgcgtatccgtcttatgtaaaagacaaacaatgcgtagtgaaatatatattaaacgcattgtttgtcttttacatattacggtaacgcggaattcgcaactattttatcaattttttgcgtcgaccggaactatcttgaagagtagtagtggactagtgtgacgctgctgacccctttctttcccttctacagatccaagctgtgaccggcgcctacacctgcagcccaagcttacctaaaggacgggtggcatccctgtgacccctccccagtgcctctcctggccctggaagttgccactccagtgcccaccagccttgtcctaataaaattaagttgcatcattttgtctgactaggtgtccttctataatattatggggtggaggggggtggtatggagcaaggggcaagttgggaagacaacctgtagggcctgcggggtctattgggaaccaagctggagtgcagtggcacaatcttggctcactgcaatctccgcctcctgggttcaagcgattctcctgcctcagcctcccgagttgttgggattccaggcatgcatgaccaggctcagctaatttttgtttttttggtagaaacggggtttcaccatattggccaggctggtctccaactcctaatctcaggtgatctacccaccttggcctcccaaattgctgggattacaggcgtgaaccactgctcccttccctgtccttc

SEQ ID NO: 983 - DNA, 1246 bp, synthetic construct
  source 1..1246: mol_type = other DNA
ggatctgcgatcgctccggtgcccgtcagtgggcagagcgcacatcgcccacagtccccgagaagttggggggaggggtcggcaattgaacgggtgcctagagaaggtggcgcggggtaaactgggaaagtgatgtcgtgtactggctccgcctttttcccgagggtgggggagaaccgtatataagtgcagtagtcgccgtgaacgttctttttcgcaacgggtttgccgccagaacacagctgaagcttcgaggggctcgcatctctccttcacgcgcccgccgccctacctgaggccgccatccacgccggttgagtcgcgttctgccgcctcccgcctgtggtgcctcctgaactgcgtccgccgtctaggtaagtcgactcgttggatccccactacccggatcaacgccctaggtttatgtttggatgaactgacatacgcgtatccgtcttaagaatcttttcaaacactagtagtgaaatatatattaaactagtgtttgaaaagattcttattacggtaacgcggaattcgcaactattttatcaattttttgcgtcgacacttcaaggggcttgcggccgcaaccatctccatggcgacggtgacttaggagtatgtgtttgaatgaggcttcagtactttacagaatcgttgcctgcacatcttggaaacacttgctgggattacttcgacttcttaacccaacagaaggctcgagaaggtatattgctgttgacagtgagcgcaggaaatgagattgatttttttagtgaagccacagatgtataaaaatcaatctcatttcctgtgcctactgcctcggacttcaaggggctagaattcgagcaattatcttgtttactaaaactgaataccttgctatctctttgatacatttttacaaagctgaattaaaatggtataaattaaatcactttgactgtgacagcagagtatgccggatcaacgccctaggtttatgtttggatgaactgacatacgcgtatccgtcttatgtaaaagacaaacaatgcgtagtgaaatatatattaaacgcattgtttgtcttttacatattacggtaacgcggaattcgcaactattttatcaattttttgcgtcgaccggaactatcttgaagagtagtagtggactagtgtgacgctgctgacccctttctttcccttctacagatccaagctgtgaccggcgcctacacctgcagcccaagcttacc

SEQ ID NO: 984 - DNA, 486 bp, synthetic construct; identical to SEQ ID NO: 978
  source 1..486: mol_type = other DNA

SEQ ID NO: 985 - DNA, 731 bp, synthetic construct
  source 1..731: mol_type = other DNA
cggatcaacgccctaggtttatgtttggatgaactgacatacgcgtatccgtcttaagaatcttttcaaacactagtagtgaaatatatattaaactagtgtttgaaaagattcttattacggtaacgcggaattcgcaactattttatcaattttttgcgtcgacacttcaaggggcttgcggccgcaaccatctccatggcgacggtgacttaggagtatgtgtttgaatgaggcttcagtactttacagaatcgttgcctgcacatcttggaaacacttgctgggattacttcgacttcttaacccaacagaaggctcgagaaggtatattgctgttgacagtgagcgcaggaaatgagattgatttttttagtgaagccacagatgtataaaaatcaatctcatttcctgtgcctactgcctcggacttcaaggggctagaattcgagcaattatcttgtttactaaaactgaataccttgctatctctttgatacatttttacaaagctgaattaaaatggtataaattaaatcactttgactgtgacagcagagtatgccggatcaacgccctaggtttatgtttggatgaactgacatacgcgtatccgtcttatgtaaaagacaaacaatgcgtagtgaaatatatattaaacgcattgtttgtcttttacatattacggtaacgcggaattcgcaactattttatcaattttttgcgtcgac

SEQ ID NO: 986 - DNA, 508 bp, synthetic construct
  source 1..508: mol_type = other DNA
tgtttgaatgaggcttcagtactttacagaatcgttgcctgcacatcttggaaacacttgctgggattacttcgacttcttaacccaacagaaggctcgagaaggtatattgctgttgacagtgagcgcaggaaatgagattgatttttttagtgaagccacagatgtataaaaatcaatctcatttcctgtgcctactgcctcggacttcaaggggctagaattcgagcaattatcttgtttactaaaactgaataccttgctatctctttgatacatttttacaaagctgaattaaaatggtataaattaaatcactttgactgtgacagcagagtatgccggatcaacgccctaggtttatgtttggatgaactgacatacgcgtatccgtcttatgtaaaagacaaacaatgcgtagtgaaatatatattaaacgcattgtttgtcttttacatattacggtaacgcggaattcgcaactattttatcaattttttgcgtcgac

SEQ ID NO: 987 - DNA, 578 bp, synthetic construct
  source 1..578: mol_type = other DNA
ccggatcaacgccctaggtttatgtttggatgaactgacatacgcgtatccgtctaaaaatcaatctcatttcctggtagtgaaatatatattaaaccaggaaatgagattgatttttttacggtaacgcggaattcgcaactattttatcaattttttgcgtcgacacttcaaggggcttgcggccgcaaccatctccatggcgacggtgacttaggagtatgccggatcaacgccctaggtttatgtttggatgaactgacatacgcgtatccgtcttatgtaaaagacaaacaatgcgtagtgaaatatatattaaacgcattgtttgtcttttacatattacggtaacgcggaattcgcaactattttatcaattttttgcgtcgacgactgtgacagcagagtatgccggatcaacgccctaggtttatgtttggatgaactgacatacgcgtatccgtcttaagaatcttttcaaacactagtagtgaaatatatattaaactagtgtttgaaaagattcttattacggtaacgcggaattcgcaactattttatcaattttttgcgtcgac

SEQ ID NO: 988 - DNA, 1899 bp, synthetic construct
  source 1..1899: mol_type = other DNA
ggatctgcgatcgctccggtgcccgtcagtgggcagagcgcacatcgcccacagtccccgagaagttggggggaggggtcggcaattgaacgggtgcctagagaaggtggcgcggggtaaactgggaaagtgatgtcgtgtactggctccgcctttttcccgagggtgggggagaaccgtatataagtgcagtagtcgccgtgaacgttctttttcgcaacgggtttgccgccagaacacagctgaagcttcgaggggctcgcatctctccttcacgcgcccgccgccctacctgaggccgccatccacgccggttgagtcgcgttctgccgcctcccgcctgtggtgcctcctgaactgcgtccgccgtctaggtaagtcgactcgttggatccccactacccggatcaacgccctaggtttatgtttggatgaactgacatacgcgtatccgtcttaagaatcttttcaaacactagtagtgaaatatatattaaactagtgtttgaaaagattcttattacggtaacgcggaattcgcaactattttatcaattttttgcgtcgacacttcaaggggcttgcggccgcaaccatctccatggctgtttgaatgaggcttcagtactttacagaatcgttgcctgcacatcttggaaacacttgctgggattacttcgacttcttaacccaacagaaggctcgagaaggtatattgctgttgacagtgagcgccagtgtgaagctcttgtcagatagtgaagccacagatgtatctgacaagagcttcacactgatgcctactgcctcggacttcaaggggctagaattcgagcaattatcttgtttactaaaactgaataccttgctatctctttgatacatttttacaaagctgaattaaaatggtataaattaaatcactttgacggtgacttaggagtatgccggatcaacgccctaggtttatgtttggatgaactgacatacgcgtatccgtctaaaaatcaatctcatttcctggtagtgaaatatatattaaaccaggaaatgagattgatttttttacggtaacgcggaattcgcaactattttatcaattttttgcgtcgacgactgtgacagcagagtatgccggatcaacgccctaggtttatgtttggatgaactgacatacgcgtatccgtcttatgtaaaagacaaacaatgcgtagtgaaatatatattaaacgcattgtttgtcttttacatattacggtaacgcggaattcgcaactattttatcaattttttgcgtcgaccggaactatcttgaagagtagtagtggactagtgtgacgctgctgacccctttctttcccttctacagatccaagctgtgaccggcgcctacacctgcagcccaagcttacctaaaggacgggtggcatccctgtgacccctccccagtgcctctcctggccctggaagttgccactccagtgcccaccagccttgtcctaataaaattaagttgcatcattttgtctgactaggtgtccttctataatattatggggtggaggggggtggtatggagcaaggggcaagttgggaagacaacctgtagggcctgcggggtctattgggaaccaagctggagtgcagtggcacaatcttggctcactgcaatctccgcctcctgggttcaagcgattctcctgcctcagcctcccgagttgttgggattccaggcatgcatgaccaggctcagctaatttttgtttttttggtagaaacggggtttcaccatattggccaggctggtctccaactcctaatctcaggtgatctacccaccttggcctcccaaattgctgggattacaggcgtgaaccactgctcccttccctgtccttc

SEQ ID NO: 989 - DNA, 1413 bp, synthetic construct
  source 1..1413: mol_type = other DNA
ggatctgcgatcgctccggtgcccgtcagtgggcagagcgcacatcgcccacagtccccgagaagttggggggaggggtcggcaattgaacgggtgcctagagaaggtggcgcggggtaaactgggaaagtgatgtcgtgtactggctccgcctttttcccgagggtgggggagaaccgtatataagtgcagtagtcgccgtgaacgttctttttcgcaacgggtttgccgccagaacacagctgaagcttcgaggggctcgcatctctccttcacgcgcccgccgccctacctgaggccgccatccacgccggttgagtcgcgttctgccgcctcccgcctgtggtgcctcctgaactgcgtccgccgtctaggtaagtcgactcgttggatccccactacccggatcaacgccctaggtttatgtttggatgaactgacatacgcgtatccgtcttaagaatcttttcaaacactagtagtgaaatatatattaaactagtgtttgaaaagattcttattacggtaacgcggaattcgcaactattttatcaattttttgcgtcgacacttcaaggggcttgcggccgcaaccatctccatggctgtttgaatgaggcttcagtactttacagaatcgttgcctgcacatcttggaaacacttgctgggattacttcgacttcttaacccaacagaaggctcgagaaggtatattgctgttgacagtgagcgccagtgtgaagctcttgtcagatagtgaagccacagatgtatctgacaagagcttcacactgatgcctactgcctcggacttcaaggggctagaattcgagcaattatcttgtttactaaaactgaataccttgctatctctttgatacatttttacaaagctgaattaaaatggtataaattaaatcactttgacggtgacttaggagtatgccggatcaacgccctaggtttatgtttggatgaactgacatacgcgtatccgtctaaaaatcaatctcatttcctggtagtgaaatatatattaaaccaggaaatgagattgatttttttacggtaacgcggaattcgcaactattttatcaattttttgcgtcgacgactgtgacagcagagtatgccggatcaacgccctaggtttatgtttggatgaactgacatacgcgtatccgtcttatgtaaaagacaaacaatgcgtagtgaaatatatattaaacgcattgtttgtcttttacatattacggtaacgcggaattcgcaactattttatcaattttttgcgtcgaccggaactatcttgaagagtagtagtggactagtgtgacgctgctgacccctttctttcccttctacagatccaagctgtgaccggcgcctacacctgcagcccaagcttacc

SEQ ID NO: 990 - DNA, 486 bp, synthetic construct; identical to SEQ ID NO: 978
  source 1..486: mol_type = other DNA

SEQ ID NO: 991 - DNA, 374 bp, synthetic construct
  source 1..374: mol_type = other DNA
ggatctgcgatcgctccggtgcccgtcagtgggcagagcgcacatcgcccacagtccccgagaagttggggggaggggtcggcaattgaacgggtgcctagagaaggtggcgcggggtaaactgggaaagtgatgtcgtgtactggctccgcctttttcccgagggtgggggagaaccgtatataagtgcagtagtcgccgtgaacgttctttttcgcaacgggtttgccgccagaacacagctgaagcttcgaggggctcgcatctctccttcacgcgcccgccgccctacctgaggccgccatccacgccggttgagtcgcgttctgccgcctcccgcctgtggtgcctcctgaactgcgtccgccgtctag

SEQ ID NO: 992 - DNA, 140 bp, synthetic construct
  source 1..140: mol_type = other DNA
gttaataattaacatatatgttaatcattaacatatagttaattattaaccgctatgttaatgattaacaacggttaataattaacatatatgttaatcattaacatataactagtctagagggtatataatgggggcca

SEQ ID NO: 993 - RNA, 97 nt, synthetic construct
  source 1..97: mol_type = other RNA
aataaaagatctttaatgaaaatagatctgtgtgttggttttttgtgtgaataaaagatccagagctctagagatctgtgtgttggttttttgtgtg

SEQ ID NO: 994 - RNA, 479 nt, Homo sapiens
  source 1..479: mol_type = unassigned RNA
cgggtggcatccctgtgacccctccccagtgcctctcctggccctggaagttgccactccagtgcccaccagccttgtcctaataaaattaagttgcatcattttgtctgactaggtgtccttctataatattatggggtggaggggggtggtatggagcaaggggcaagttgggaagacaacctgtagggcctgcggggtctattgggaaccaagctggagtgcagtggcacaatcttggctcactgcaatctccgcctcctgggttcaagcgattctcctgcctcagcctcccgagttgttgggattccaggcatgcatgaccaggctcagctaatttttgtttttttggtagaaacggggtttcaccatattggccaggctggtctccaactcctaatctcaggtgatctacccaccttggcctcccaaattgctgggattacaggcgtgaaccactgctcccttccctgtccttc

SEQ ID NO: 995 - RNA, 228 nt, Bos sp.
  source 1..228: mol_type = unassigned RNA
cgactgtgccttctagttgccagccatctgttgtttgcccctcccccgtgccttccttgaccctggaaggtgccactcccactgtcctttcctaataaaatgaggaaattgcatcgcattgtctgagtaggtgtcattctattctggggggtggggtggggcaggacagcaagggggaggattgggaagacaatagcaggcatgctggggatgcggtgggctctatgg

SEQ ID NO: 996 - protein, 437 aa, synthetic construct
MLQDPDSDQPLNSLDVKPLRKPRIPMETFRKVGIPIIIALLSLASIIIVVVLIKVILDKYYFLCGQPLHFIPRKQLCDGELDCPLGEDEEHCVKSFPEGPAVAVRLSKDRSTLQVLDSATGNWFSACFDNFTEALAETACRQMGYSSKPTFRAVEIGPDQDLDVVEITENSQELRMRNSSGPCLSGSLVSLHCLACGKSLKTPRVVGVEEASVDSWPWQVSIQYDKQHVCGGSILDPHWVLTAAHCFRKHTDVFNWKVRAGSDKLGSFPSLAVAKIIIIEFNPMYPKDNAIALMKLQFPLTFSGTVRPICLPFFDEELTPATPLWIIGWGFTKQNGGKMSDILLQASVQVIDSTRCNADDAYQGEVTEKMMCAGIPEGGVDTCQGDSGGPLMYQSDQWHVVGIVSWGYGCGGPSTPGVYTKVSAYLNWIYNVWKAEL

SEQ ID NO: 997 - protein, 204 aa, synthetic construct
MLQDPDSDQPLNSLDVKPLRKPRIPMETFRKVGIPIIIALLSLASIIIVVVLIKVILDKYYFLCGQPLHFIPRKQLCDGELDCPLGEDEEHCVKSFPEGPAVAVRLSKDRSTLQVLDSATGNWFSACFDNFTEALAETACRQMGYSSKPTFRAVEIGPDQDLDVVEITENSQELRMRNSSGPCLSGSLVSLHCLACGKSLKTPR

SEQ ID NO: 998 - protein, 18 aa, synthetic construct
GSTSGSGKPGSGEGSTKG

SEQ ID NO: 999 - DNA, 321 bp, synthetic construct
  source 1..321: mol_type = other DNA
gccatccggatgacacagagcccaagttcactgtcagcgagtgtcggagatcgggttactataacctgccgagcatctcaggatatcaataattacctggcctggtatcagcaaaaacccggcaaagtcccgaagctcctgatatacgcagcttcaacactgcaaagcggtgtgccctcgcgctttagcggctctggcagcgggacagatttcaccctgacgatttcctcccttcaacccgaggacgtggccacttactactccctcaactattactctgtaccctggacctttggccaagggacaaaggtggaaatcaag

SEQ ID NO: 1000 - DNA, 321 bp, synthetic construct
  source 1..321: mol_type = other DNA
gacattcagatgacgcagagtccaagctccttgtccgcttctgtgggcgatagagtaaccattacttgcagggcttcacagagcatctcttcatacctgaactggtaccagcagaaacccgggaaggcacccaaacttctcatctacgctgcctcctccctacaatccggcgtgccgagtcgtttttcaggctcgggctctggcaccgacttcacactcacgataagtagtttacagcctgaggactttgccacctactattgtcaacagagctatagcacacctctgacctttggcggcgggacaaaggttgagatcaag

SEQ ID NO: 1001 - protein, 121 aa, synthetic construct
QVQLQESGPGLVKPSETLSLTCTVSGGSVSSGNFYWSWIRQPPGKGLEWIGYIYYSGSTYYNPSLKSRVTISVDTSKNQFSLKLRSLTAADTAVYYCARWMTKVKGYFDYWGQGTLVTVSS

SEQ ID NO: 1002 - protein, 7 aa, synthetic construct
SGNFYWS

SEQ ID NO: 1003 - protein, 16 aa, synthetic construct
YIYYSGSTYYNPSLKS

SEQ ID NO: 1004 - protein, 11 aa, synthetic construct
WMTKVKGYFDY

SEQ ID NO: 1005 - protein, 107 aa, synthetic construct
EIVLTQSPDFQSVTPKEKVTITCRASQSVGSGLHWYQQKPDQSPKLLIKYASQSFSGVPSRFSGSGSGTDFTLTINSLEVEDAATFYCLQSSSLPWTFGQGTKVEIK

SEQ ID NO: 1006 - protein, 11 aa, synthetic construct
RASQSVGSGLH

SEQ ID NO: 1007 - protein, 7 aa, synthetic construct
YASQSFS

SEQ ID NO: 1008 - protein, 9 aa, synthetic construct
LQSSSLPWT

SEQ ID NO: 1009 - protein, 121 aa, synthetic construct
QVQLQESGPGLVKPSETLSLTCTVSGGSVSSGSYYWSWIRQAPGKGLEWIGYIYYSGSNYYNPSLKSRVTISVDTSKNQFSLKLRAVTAADTAVYYCARWMTTIKGYFDYWGQGTLVTVSS

SEQ ID NO: 1010 - protein, 7 aa, synthetic construct
SGSYYWS

SEQ ID NO: 1011 - protein, 16 aa, synthetic construct
YIYYSGSNYYNPSLKS

SEQ ID NO: 1012 - protein, 11 aa, synthetic construct
WMTTIKGYFDY

SEQ ID NO: 1013 - protein, 107 aa, synthetic construct
EIVLTQSPDFQSVTPKEKVTITCRASQSVGSGLHWYQQKPDQSPKLLIKYASQSFSGVPSRFSGSGSGTDFTLTINSLETEDAATYFCQQSSSLPWTFGQGTKVEIK

SEQ ID NO: 1014 - protein, 9 aa, synthetic construct
QQSSSLPWT

SEQ ID NO: 1015 - protein, 122 aa, synthetic construct
QVQLVESGGGLVQPGRSLRLSCTGSGFTFGDYAMNWVRQAPGKGLEWVGFIRTKPYGGTTEYAASVKGRFTFSRDDSKSIAYLQMNSLKTEDTAVYYCTMIPVLRFLEWLPWGQGTLVTVSS

SEQ ID NO: 1016 - protein, 5 aa, synthetic construct
DYAMN

SEQ ID NO: 1017 - protein, 19 aa, synthetic construct
FIRTKPYGGTTEYAASVKG

SEQ ID NO: 1018 - protein, 11 aa, synthetic construct
IPVLRFLEWLP

SEQ ID NO: 1019 - protein, 107 aa, synthetic construct
AIRMTQSPSSLSASVGDRVTITCRASQDINNYLAWYQQKPGKVPKLLIYAASTLQSGVPSRFSGSGSGTDFTLTISSLQPEDVATYYSLNYYSVPWTFGQGTKVEIK

SEQ ID NO: 1020 - protein, 11 aa, synthetic construct
RASQDINNYLA

SEQ ID NO: 1021 - protein, 7 aa, synthetic construct
AASTLQS

SEQ ID NO: 1022 - protein, 9 aa, synthetic construct
LNYYSVPWT

SEQ ID NO: 1023 - protein, 120 aa, synthetic construct
QVQLLESGGGLVQPGGSLRLSCAASGFTFSSYAMNWVRQAPGKGLEWVSAISGGVGNTYYADSVKGRFTISRDNSKNTLYLQMNSLRAEDTAVYYCTKDGPLWGNYFDYWGRGTLVTVSS

SEQ ID NO: 1024 - protein, 5 aa, synthetic construct
SYAMN

SEQ ID NO: 1025 - protein, 17 aa, synthetic construct
AISGGVGNTYYADSVKG

SEQ ID NO: 1026 - protein, 11 aa, synthetic construct
DGPLWGNYFDY

SEQ ID NO: 1027 - protein, 107 aa, synthetic construct
EIVLTQSPSSLSASVGDRVTITCRASQGISNYLAWYQQKPGKVPNLLIYTASTLQSGVPSRFSGSGSGTDFTLTISSLQPEDVATYYCQKYNSAPFTFGPGTKVDIK

SEQ ID NO: 1028 - protein, 11 aa, synthetic construct
RASQGISNYLA

SEQ ID NO: 1029 - protein, 7 aa, synthetic construct
TASTLQS

SEQ ID NO: 1030 - protein, 9 aa, synthetic construct
QKYNSAPFT

SEQ ID NO: 1031 - protein, 121 aa, synthetic construct
QVQLQESGPGLVKPSETLSLTCSVSGGSISSSSYYWGWIRQPPGKGLEWIGSIDYSGSTYYNPSLKSRVTISIDTSKNQFSLRLSSVTAAEKAVYYCARHGRGTIGYFDYWGQGTLVTVSS

SEQ ID NO: 1032 - protein, 7 aa, synthetic construct
SSSYYWG

SEQ ID NO: 1033 - protein, 16 aa, synthetic construct
SIDYSGSTYYNPSLKS

SEQ ID NO: 1034 - protein, 11 aa, synthetic construct
HGRGTIGYFDY

SEQ ID NO: 1035 - protein, 107 aa, synthetic construct
AIRMTQSPSSLSASVGDRVTITCRASQSISSYLNWYQQKPGKAPKLLIYAASSLLTGVPSRFTGSGSGTDFTLTISSLQPEDFGTYYCQQSYSPPLTFGGGTKVEIK

SEQ ID NO: 1036 - protein, 11 aa, synthetic construct
RASQSISSYLN

SEQ ID NO: 1037 - protein, 7 aa, synthetic construct
AASSLLT

SEQ ID NO: 1038 - protein, 9 aa, synthetic construct
QQSYSPPLT

SEQ ID NO: 1039 - protein, 120 aa, synthetic construct
QVQLLESGGGLVQPGGSLRLSCAASGFTFSSSAMAWVRQAPGKGLEWVSAISSSGDNTYYADSVKGRFTISRDTSKNTLSLQMSSLRAEDTAIYYCAKQGTNWGLYFDYWGQGTLVTVSS

SEQ ID NO: 1040 - protein, 5 aa, synthetic construct
SSAMA

SEQ ID NO: 1041 - protein, 17 aa, synthetic construct
AISSSGDNTYYADSVKG

SEQ ID NO: 1042 - protein, 11 aa, synthetic construct
QGTNWGLYFDY

SEQ ID NO: 1043 - protein, 107 aa, synthetic construct
AIRMTQSPSSLSASVGDRVTIACRASQVISNYLAWYQQKPGKVPKLLIYVASTLQSGVPSRFSGSGSGTDFTLTISSLQPEDVATYYCQNYNSAPWTFGQGTKLEIK

SEQ ID NO: 1044 - protein, 11 aa, synthetic construct
RASQVISNYLA

SEQ ID NO: 1045 - protein, 7 aa, synthetic construct
VASTLQS

SEQ ID NO: 1046 - protein, 9 aa, synthetic construct
QNYNSAPWT

SEQ ID NO: 1047 - protein, 124 aa, synthetic construct
QVQLQESGPELVKPSETLSITCTVSGGSISSRSYYWGWIRQPPGKGLEWIGSIYYGGSTYYNPSLKSRVTISADTSKNQFSLKLNSVTAADTAVFYCVRHPAGYSTRWSAFDIWGQGTMVTVSS

SEQ ID NO: 1048 - protein, 7 aa, synthetic construct
SRSYYWG

SEQ ID NO: 1049 - protein, 16 aa, synthetic construct
SIYYGGSTYYNPSLKS

SEQ ID NO: 1050 - protein, 14 aa, synthetic construct
HPAGYSTRWSAFDI

SEQ ID NO: 1051 - protein, 106 aa, synthetic construct
EIVLTQSPSSLSASVGDRVTITCRASQSISSYLNWYQQKPGRAPELLIYAASSLQSGVPSRFSGSGSGTDFTLTISSLQPEDFATYYCQQSFSSLTFGQGTRLEIK

SEQ ID NO: 1052 - protein, 8 aa, synthetic construct
QQSFSSLT

SEQ ID NO: 1053 - protein, 124 aa, synthetic construct
QVQLQESGPGLVKPSETLSLTCTVSGGSISSRSYYWGWIRQPPGKGPEWIGSIYYSGSTFYNPSLKSRVTISEDTSKSQFSLKVTSVTAADTAVYYCARHPAGYSSSWSAFDIWGQGTMVTVSS

SEQ ID NO: 1054 - protein, 16 aa, synthetic construct
SIYYSGSTFYNPSLKS

SEQ ID NO: 1055 - protein, 14 aa, synthetic construct
HPAGYSSSWSAFDI

SEQ ID NO: 1056 - protein, 106 aa, synthetic construct
EIVLTQSPSSLSASVGDRVTITCRASQSISSYLNWYQLKPGKAPKLLIYAASSLHSGVPSRFSGSGSGTDFTLTISSLQPADFATYYCQQAYISLTFGQGTRLEIK

SEQ ID NO: 1057 - protein, 7 aa, synthetic construct
AASSLHS

SEQ ID NO: 1058 - protein, 8 aa, synthetic construct
QQAYISLT

SEQ ID NO: 1059 - protein, 122 aa, synthetic construct
QVQLVESGGGLVQPGRSLRLSCSGSGFTSGDYAVSWVRQAPGKGLEWVGFIRTKPYGETTEYAASVKGRFTISRDDSKSIAYLQMNSLKAEDTAVFYCTFIPVSRFLEWLPWGQGIPVTVSS

SEQ ID NO: 1060 - protein, 5 aa, synthetic construct
DYAVS

SEQ ID NO: 1061 - protein, 19 aa, synthetic construct
FIRTKPYGETTEYAASVKG

SEQ ID NO: 1062 - protein, 11 aa, synthetic construct
IPVSRFLEWLP

SEQ ID NO: 1063 - protein, 107 aa, synthetic construct
AIRMTQSPSSLSAFVGDRVTITCRASQDIGNYLAWYQQTPEKVPKLLIYAASTLQSGVPSRFSGSGSGTDFTLTISSLQPEDVATYYCQNYYSVPWTFGQGTKVEIK

SEQ ID NO: 1064 - protein, 11 aa, synthetic construct
RASQDIGNYLA

SEQ ID NO: 1065 - protein, 9 aa, synthetic construct
QNYYSVPWT

SEQ ID NO: 1066 - protein, 120 aa, synthetic construct
QVQLLESGGGLVQPGASLRLSCAASGFTFSTYAMTWVRQAPGKGLEWVSGINGGGDTTYYADSVKGRFTISRDNSKNTLYLQMNSLRAEDTAVYYCAVRGYTYGYFFDYWGQGTLVTVSS

SEQ ID NO: 1067 - protein, 5 aa, synthetic construct
TYAMT

SEQ ID NO: 1068 - protein, 17 aa, synthetic construct
GINGGGDTTYYADSVKG

SEQ ID NO: 1069 - protein, 11 aa, synthetic construct
RGYTYGYFFDY

SEQ ID NO: 1070 - protein, 107 aa, synthetic construct
AIRMTQSPSSLSASVGDRVTITCRASQGISNYLAWYQQRPGKVPKLLIYAASTLRSGVPSRFSGSGSGTDFTLTISSLQPEDVATYYCQKYNSAPLTFGGGTKVEIK

SEQ ID NO: 1071 - protein, 7 aa, synthetic construct
AASTLRS

SEQ ID NO: 1072 - protein, 9 aa, synthetic construct
QKYNSAPLT

SEQ ID NO: 1073 - protein, 125 aa, synthetic construct
QVQLQESGPGLVKPSETLSLTCTVSGGSISSSSYYWGWIRQPPGKGLEWIGSLYYSGSTYYNPSLKSRVTISVDTSKNQFSLKLNSVTAADTAVYYCTRHPRGIAARWGNWFDPWGQGTLVTVSS

SEQ ID NO: 1074 - protein, 16 aa, synthetic construct
SLYYSGSTYYNPSLKS

SEQ ID NO: 1075 - protein, 15 aa, synthetic construct
HPRGIAARWGNWFDP

SEQ ID NO: 1076 - protein, 107 aa, synthetic construct
EIVLTQSPSSLSASVGDRLTITCRASQTISSYLNWYQQKPGKAPKVLIYAASSLQSGVPSRFSGSGSGTDFTLTISSLQPEDFATYYCQQSFIIPYTFGQGTKLEIK

SEQ ID NO: 1077 - protein, 9 aa, synthetic construct
QQSFIIPYT

SEQ ID NO: 1078 - protein, 122 aa, synthetic construct
QVQLQESGPGLVKPSETLSLTCTVSGGSISSSSYYRGWIRQPPGKGLEWIGSIYYSGSTYYNPSLKSRVTISVDTSKNQFSLKLSSVTAADTAVYYCARHPRGSYGANFDYWGQGTLVTVSS

SEQ ID NO: 1079 - protein, 7 aa, synthetic construct
SSSYYRG

SEQ ID NO: 1080 - protein, 16 aa, synthetic construct
SIYYSGSTYYNPSLKS

SEQ ID NO: 1081 - protein, 12 aa, synthetic construct
HPRGSYGANFDY

SEQ ID NO: 1082 - protein, 107 aa, synthetic construct
EIVLTQSPSSLSASVGDRVTITCRASQSISSYLNWYQQKPGKAPKLLIYAASSLQSGVPSRFSGSGSGTDFTLTISSLQPEDFATYYCQQSYSTPFTFGPGTKVDIK

SEQ ID NO: 1083 - protein, 9 aa, synthetic construct
QQSYSTPFT

SEQ ID NO: 1084 - protein, 122 aa, synthetic construct
QVQLVESGGGLVQPGRSLRLSCIGSGFTFGEYAMSWVRQAPGKGLEWVGFIRTKPYGGTTEFAASVKGRFTMSRDDSKSIAYLEMNSLKTEDTAVYYCTLIPALRFLEWLPWGQGTLVTVSS

SEQ ID NO: 1085 - protein, 5 aa, synthetic construct
EYAMS

SEQ ID NO: 1086 - protein, 19 aa, synthetic construct
FIRTKPYGGTTEFAASVKG

SEQ ID NO: 1087 - protein, 11 aa, synthetic construct
IPALRFLEWLP

SEQ ID NO: 1088 - protein, 107 aa, synthetic construct
EIVLTQSPSSLSASVGDRVTVTCRANQDINNYLAWYQQTPGKVPKLLIYAASTLQSGVPSRFSGSGSGTDFTLTISSLQPEDVATYYCQNYYSVPWTFGQGTKLEIK

SEQ ID NO: 1089 - protein, 11 aa, synthetic construct
RANQDINNYLA

SEQ ID NO: 1090 - protein, 121 aa, synthetic construct
QVQLQESGPGLVKPSETLSLTCTVSGGSVSSGSYYWSWIRQPPGKGLEWIGYIFYSGSTYYNPSLKSRVTISVDTSKNQFSLKLTSVTAADTAVYFCARWMTTVKGYFDYWGQGTLVTVSS

SEQ ID NO: 1091 - protein, 16 aa, synthetic construct
YIFYSGSTYYNPSLKS

SEQ ID NO: 1092 - protein, 11 aa, synthetic construct
WMTTVKGYFDY

SEQ ID NO: 1093 - protein, 107 aa, synthetic construct
EIVLTQSPDFQSVTPKESVTITCRASQSVGSGLHWYQQKPDQSPKLLIKYASQSFSGVPSRFSGSGSGTDFTLTINSLEAEDAATYYCLQSSSLPWTFGQGTKVEIK

SEQ ID NO: 1094 - protein, 123 aa, synthetic construct
QVQLQESGPGLVKPSETLSLTCTVSGGSVSSASYYWSWIRQPPGKGLEYIGYIYYSGSTYYNPSLKSRVTISIDTSKNQFSLNLRSVTAADTAVYYCARYIVGRPGFNWFDPWGQGTLVTVSS

SEQ ID NO: 1095 - protein, 7 aa, synthetic construct
SASYYWS

SEQ ID NO: 1096 - protein, 13 aa, synthetic construct
YIVGRPGFNWFDP

SEQ ID NO: 1097 - protein, 107 aa, synthetic construct
AIRMTQSPSSLSASVGDRVTITCRASQSISSYLNWYQQKPGKAPKFLISPASSLQSGVPSRFSGSGSGTDFTLTISSLQPEDFATYYCQQSYSIPWTFGQGTKVEIK

SEQ ID NO: 1098 - protein, 7 aa, synthetic construct
PASSLQS

SEQ ID NO: 1099 - protein, 9 aa, synthetic construct
QQSYSIPWT

SEQ ID NO: 1100 - protein, 123 aa, synthetic construct
QVQLQESGPGLVKPSETLSLTCTVSGDSVSSVSYYWSWIRQPPGKGLEWIGYIWYSGSTYYNPSLKSRVTISIDTSKNQFSLKLRSVTAADTAVYYCARYIVGRPGFNWFDPWGQGTLVTVSS

SEQ ID NO: 1101 - protein, 7 aa, synthetic construct
SVSYYWS

SEQ ID NO: 1102 - protein, 16 aa, synthetic construct
YIWYSGSTYYNPSLKS

SEQ ID NO: 1103 - protein, 107 aa, synthetic construct
AIRMTQSPSSLSASVGDRVTITCRASQTISSYLNWYQQKPGKAPKLLISPASNLQSGVPSRFSGSGSGTDFTLTISSLQPEDFATYYCQQSYIIPWTFGQGTKVEIK

SEQ ID NO: 1104 - protein, 7 aa, synthetic construct
PASNLQS

SEQ ID NO: 1105 - protein, 9 aa, synthetic construct
QQSYIIPWT

SEQ ID NO: 1106 - skipped

SEQ ID NO: 1107 - protein, 246 aa, synthetic construct
EIVLTQSPDFQSVTPKEKVTITCRASQSVGSGLHWYQQKPDQSPKLLIKYASQSFSGVPSRFSGSGSGTDFTLTINSLEVEDAATFYCLQSSSLPWTFGQGTKVEIKGSTSGSGKPGSGEGSTKGQVQLQESGPGLVKPSETLSLTCTVSGGSVSSGNFYWSWIRQPPGKGLEWIGYIYYSGSTYYNPSLKSRVTISVDTSKNQFSLKLRSLTAADTAVYYCARWMTKVKGYFDYWGQGTLVTVSS

SEQ ID NO: 1108 - protein, 246 aa, synthetic construct
EIVLTQSPDFQSVTPKEKVTITCRASQSVGSGLHWYQQKPDQSPKLLIKYASQSFSGVPSRFSGSGSGTDFTLTINSLETEDAATYFCQQSSSLPWTFGQGTKVEIKGSTSGSGKPGSGEGSTKGQVQLQESGPGLVKPSETLSLTCTVSGGSVSSGSYYWSWIRQAPGKGLEWIGYIYYSGSNYYNPSLKSRVTISVDTSKNQFSLKLRAVTAADTAVYYCARWMTTIKGYFDYWGQGTLVTVSS

SEQ ID NO: 1109 - protein, 247 aa, synthetic construct
DIQMTQSPSSLSASVGDRVTITCRASQDINNYLAWYQQKPGKVPKLLIYAASTLQSGVPSRFSGSGSGTDFTLTISSLQPEDVATYYSLNYYSVPWTFGQGTKVEIKGSTSGSGKPGSGEGSTKGQVQLVESGGGLVQPGRSLRLSCTGSGFTFGDYAMNWVRQAPGKGLEWVGFIRTKPYGGTTEYAASVKGRFTFSRDDSKSIAYLQMNSLKTEDTAVYYCTMIPVLRFLEWLPWGQGTLVTVSS

SEQ ID NO: 1110 - DNA, 363 bp, synthetic construct
  source 1..363: mol_type = other DNA
caagtgcaactgcaagagtctggacccgggctggtgaaaccaagcgagacattatccctcacttgtaccgtgtcaggcggtagtgtgtcctccgggaatttctactggagttggatacgccagcctcctgggaagggccttgaatggattggctacatctactattcaggctccacctactacaacccgtctttgaagtcaagggttacgataagcgtcgatacctccaaaaaccaattctccctaaagctcagatcgttaactgccgctgataccgcggtgtactattgtgcccgttggatgaccaaagttaagggttatttcgactattggggacaagggacacttgtcaccgtgtcctcc

SEQ ID NO: 1111 - DNA, 321 bp, synthetic construct
  source 1..321: mol_type = other DNA
gaaatcgtcctgacacagtctccagattttcagagcgtgacgccaaaggagaaagtgacaattacatgccgggcatctcagtctgttgggtctgggttgcattggtatcagcaaaagcccgaccagtcacccaaactgctcatcaaatatgcaagccagagtttttcaggcgtaccttcacgatttagcggaagtggttctggcactgacttcaccttgacgattaatagcctggaagtagaagacgctgccactttctactgcctgcaaagtagctccctgccctggacttttgggcagggtactaaggtcgagatcaag

SEQ ID NO: 1112 - DNA, 363 bp, synthetic construct
  source 1..363: mol_type = other DNA
caagtgcaactgcaagaatcgggacccgggctggttaaaccaagtgaaaccctttccctcacttgtaccgtaagcggcggtagcgtgtcctctggtagctactattggagttggattaggcaggcgccagggaaaggcctcgaatggattgggtatatctactacagcggcagtaactactacaacccatcattgaagtctagagtgacaattagtgtcgatacctctaaaaatcaattctcacttaagctgcgagctgtaaccgccgcagacactgcggtgtactattgtgcccgttggatgaccactatcaagggctacttcgattattggggacaagggacattagttacggtgtcctcc

SEQ ID NO: 1113 - DNA, 321 bp, synthetic construct
  source 1..321: mol_type = other DNA
gagatagtcctgacccagtcacccgatttccagagtgttactcctaaggagaaagtgactataacatgccgggcatctcagtctgtcggaagcgggctacattggtaccagcagaagcctgaccagagcccgaaactgctcatcaaatatgcctcccagtcgttttctggcgtgccctctcgcttttccggaagcggatctggcacagacttcaccttgaccatcaatagcctggaaactgaggacgccgctacgtatttctgccagcagtcctccagtctgccttggacatttggtcagggaacgaaggtggagatcaag

SEQ ID NO: 1114 - DNA, 366 bp, synthetic construct
  source 1..366: mol_type = other DNA
caggtccagctcgtggagtctggcggtgggctggttcagccagggaggagtttgcggctttcctgtacgggaagcggattcacctttggtgactatgccatgaactgggtcaggcaggctcctggaaaaggcctagagtgggtgggtttcatcagaaccaagccatatggcggcactacagaatatgcagccagcgtaaaagggagattcacgttcagccgcgacgactctaagtcaatagcttaccttcagatgaactccctcaagaccgaagacaccgccgtgtactattgtactatgatccctgtgctgcgttttttagagtggttgccttggggacaagggacattagttactgtgtcctcc

SEQ ID NO: 1115 - DNA, 321 bp, synthetic construct
  source 1..321: mol_type = other DNA
gatattcagatgacacagagcccaagttcactgtcagcgagtgtcggagatcgggttactataacctgccgagcatctcaggatatcaataattacctggcctggtatcagcaaaaacccggcaaagtcccgaagctcctgatatacgcagcttcaacactgcaaagcggtgtgccctcgcgctttagcggctctggcagcgggacagatttcaccctgacgatttcctcccttcaacccgaggacgtggccacttactactccctcaactattactctgtaccctggacctttggccaagggacaaaggtggaaatcaag

SEQ ID NO: 1116 - DNA, 738 bp, synthetic construct
  source 1..738: mol_type = other DNA
gaaatcgtcctgacacagtctccagattttcagagcgtgacgccaaaggagaaagtgacaattacatgccgggcatctcagtctgttgggtctgggttgcattggtatcagcaaaagcccgaccagtcacccaaactgctcatcaaatatgcaagccagagtttttcaggcgtaccttcacgatttagcggaagtggttctggcactgacttcaccttgacgattaatagcctggaagtagaagacgctgccactttctactgcctgcaaagtagctccctgccctggacttttgggcagggtactaaggtcgagatcaagggctcgacaagcggaagtggcaaaccgggcagcggcgagggaagcaccaagggacaagtgcaactgcaagagtctggacccgggctggtgaaaccaagcgagacattatccctcacttgtaccgtgtcaggcggtagtgtgtcctccgggaatttctactggagttggatacgccagcctcctgggaagggccttgaatggattggctacatctactattcaggctccacctactacaacccgtctttgaagtcaagggttacgataagcgtcgatacctccaaaaaccaattctccctaaagctcagatcgttaactgccgctgataccgcggtgtactattgtgcccgttggatgaccaaagttaagggttatttcgactattggggacaagggacacttgtcaccgtgtcctcc

SEQ ID NO: 1117 - DNA, 738 bp, synthetic construct
  source 1..738: mol_type = other DNA
gagatagtcctgacccagtcacccgatttccagagtgttactcctaaggagaaagtgactataacatgccgggcatctcagtctgtcggaagcgggctacattggtaccagcagaagcctgaccagagcccgaaactgctcatcaaatatgcctcccagtcgttttctggcgtgccctctcgcttttccggaagcggatctggcacagacttcaccttgaccatcaatagcctggaaactgaggacgccgctacgtatttctgccagcagtcctccagtctgccttggacatttggtcagggaacgaaggtggagatcaagggttcaacatcagggagcgggaaaccgggctctggcgagggctcaacaaagggacaagtgcaactgcaagaatcgggacccgggctggttaaaccaagtgaaaccctttccctcacttgtaccgtaagcggcggtagcgtgtcctctggtagctactattggagttggattaggcaggcgccagggaaaggcctcgaatggattgggtatatctactacagcggcagtaactactacaacccatcattgaagtctagagtgacaattagtgtcgatacctctaaaaatcaattctcacttaagctgcgagctgtaaccgccgcagacactgcggtgtactattgtgcccgttggatgaccactatcaagggctacttcgattattggggacaagggacattagttacggtgtcctcc

SEQ ID NO: 1118 - DNA, 741 bp, synthetic construct
  source 1..741: mol_type = other DNA
gatattcagatgacacagagcccaagttcactgtcagcgagtgtcggagatcgggttactataacctgccgagcatctcaggatatcaataattacctggcctggtatcagcaaaaacccggcaaagtcccgaagctcctgatatacgcagcttcaacactgcaaagcggtgtgccctcgcgctttagcggctctggcagcgggacagatttcaccctgacgatttcctcccttcaacccgaggacgtggccacttactactccctcaactattactctgtaccctggacctttggccaagggacaaaggtggaaatcaagggctctactagcggttcagggaaacctgggagtggagagggctcgaccaagggacaggtccagctcgtggagtctggcggtgggctggttcagccagggaggagtttgcggctttcctgtacgggaagcggattcacctttggtgactatgccatgaactgggtcaggcaggctcctggaaaaggcctagagtgggtgggtttcatcagaaccaagccatatggcggcactacagaatatgcagccagcgtaaaagggagattcacgttcagccgcgacgactctaagtcaatagcttaccttcagatgaactccctcaagaccgaagacaccgccgtgtactattgtactatgatccctgtgctgcgttttttagagtggttgccttggggacaagggacattagttactgtgtcctcc

SEQ ID NO: 1119 - protein, 129 aa, Homo sapiens
VEVATHYLEIITQLIVESFHFKNGEDAPDLLKVITKPFTKLIVQLDKKVISQIAMNDEKAKNKSLVKIWCKTFTNKTQINVTVPSTANCTSPSLCWTDGIQNWTMKNVTYKENIAKCQHIFVNFHLPDL

SEQ ID NO: 1120 - DNA, 7730 bp, synthetic construct
  source 1..7730: mol_type = other DNA
gagccatgcttggcttacgagggcgaccaacccatcaaactccccgcccccagcacttttatttctcctctttaggaagtacacttcagtatctttggcacagtgcatgagcacgactaaagtaaaacatcgcagaaaacatagctttagtctacccttcgtgtcctaaaaggaaaaccagtagcttcccaggccaccggaagggcaacacatgtcctctgcagtttctgcacacgggaaggtaaagacagagagaggacctactcctcaacacagaaacatttcaaaatctttcctcgcctgcaacccaagctgaagtcattctccccagaaataacaaaagttggaagagaagccggagacaggataggtgcaggaagcccacactttgagggcagcactcagacaccctctcctgtgtgcaggacgtgccgaatgttcaggtgcaatgagaatgagccatgcttggcttataaggtacgactgtgccttctagttgccagccatctgttgtttgcccctcccccgtgccttccttgaccctggaaggtgccactcccactgtcctttcctaataaaatgaggaaattgcatcgcattgtctgagtaggtgtcattctattctggggggtggggtggggcaggacagcaagggggaggattgggaagacaatagcaggcatgctggggatgcggtgggctctatgggataagcttgatatcgaattcatcgatgttaataattaacatatatgttaatcattaacatatagttaattattaaccgctatgttaatgattaacaacggttaataattaacatatatgttaatcattaacatataactagtctagagggtatataatgggggccactagtctactaccagagttcatcgctagcgctaccggatccgccaccatggccctgccagtaacggctctgctgctgccacttgctctgctcctccatgcagccaggcctcaagtgcagctggtccagtctggggcggaagtgaaaaagcccggagctagtgtaaaggtgtcctgtaaagccagcggctacaccttcaccggttattacctgcattgggtccggcaggctcctggccagggcctggagtggatgggctggatttccgcatataacggaaacacaaattacgcccagaacctgcaaggccgcgtgaccatgaccagggacacaagcactagcactgtctacatggagttgtctagcttgagaagcgaagataccgctgtgtactattgcgcccgacactcttactcgggctcatactcaacgctaccctattatgggatggatgtttggggtcaagggacaacggtcacagtatcctctggaggcggtggcagcggaggaggcgggtctggaggtggtggatcagacattcagatgacccagtcaccaagttccttatccgcaagcgttggggatcgtgttacaattacttgcagggcctcgcaagggatctctaattatctcgcttggtaccagcagaaacctgggaaagcacccaagctgctgatctacactgcaagcacactttttccaggagtgccgtcaagattctctgggtccgggagtggcactgacttcacccttaccatctcctccctccagcctgaggactttgccacatattattgtcaacagagttactccataccactcacgtttggcggcggaacaaaagttgaaatcaaggcggcagcaaccacgacgccagcgccgcgaccaccaacaccggcgcccaccatcgcgtcgcagccactgtcactgcgcccagaagcgtgccggccagcggcggggggcgcagtgcatacgagggggctggacttcgcctgtgatatctacatctgggcgcccttggccgggacttgtggggtccttctcctgtcactggttatcaccctttactgcaaacggggcagaaagaaactcctgtatatattcaaacaaccatttatgagaccagtacaaactactcaagaagaggacggctgtagctgccgatttccagaagaagaagaaggaggatgtgaactgagagtgaagttcagcaggagcgcagacgcccccgcgtaccagcagggccagaaccagctctataacgagctcaatctaggacgaagagaggagtacgatgttttggacaagaggcgtggccgggaccctgagatggggggaaagccgagaaggaagaaccctcaggaaggcctgtacaatgaactgcagaaagataagatggcggaggcctacagtgagattgggatgaaaggcgagcgccggaggggcaaggggcacgatggcctttaccagggtctcagtacagccaccaaggacacctacgacgcccttcacatgcaggccctgccccctaggtaaaatcaacctctggattacaaaatttgtgaaagattgactggtattcttaactatgttgctccttttacgctatgtggatacgctgctttaatgcctttgtatcatgctattgcttcccgtatggctttcattttctcctccttgtataaatcctggttgctgtctctttatgaggagttgtggcccgttgtcaggcaacgtggcgtggtctgcactgtgtttgctgacgcaacccccactggttggggcattgccaccacctgtcagctcctttccgggactttcgctttccccctccctattgccacggcggaactcatcgccgcctgccttgcccgctgctggacaggggctcggctgttgggcactgacaattccgtggtgttgtcggggaaatcatcgtcctttccttggctgctcgcctgtgttgccacctggattctgcgcgggacgtccttctgctacgtcccttcggccctcaatccagcggaccttccttcccgcggcctgctgccggctctgcggcctcttccgcgtcttcgccttcgccctcagacgagtcggatctccctttgggccgcctccccgcctggatccttgacttgcggccaacttgtttattgcagcttataatggttacaaataaagcaatagcatcacaaatttcacaaataaagcatttttttcactgcattctagttgtggtttgtccaaactcatcaatgtatcttatcatgtctgggatccttgacttgcggccgcaactcccacctgcaacatgcgtgactgactgaggccgcgactctagagtcgaccggatctgcgatcgctccggtgcccgtcagtgggcagagcgcacatcgcccacagtccccgagaagttggggggaggggtcggcaattgaacgggtgcctagagaaggtggcgcggggtaaactgggaaagtgatgtcgtgtactggctccgcctttttcccgagggtgggggagaaccgtatataagtgcagtagtcgccgtgaacgttctttttcgcaacgggtttgccgccagaacacagctgaagcttcgaggggctcgcatctctccttcacgcgcccgccgccctacctgaggccgccatccacgccggttgagtcgcgttctgccgcctcccgcctgtggtgcctcctgaactgcgtccgccgtctaggtaagtcgactcgttggatccccactacccggatcaacgccctaggtttatgtttggatgaactgacatacgcgtatccgtcttaagaatcttttcaaacactagtagtgaaatatatattaaactagtgtttgaaaagattcttattacggtaacgcggaattcgcaactattttatcaattttttgcgtcgacacttcaaggggcttgcggccgcaaccatctccatggctgtttgaatgaggcttcagtactttacagaatcgttgcctgcacatcttggaaacacttgctgggattacttcgacttcttaacccaacagaaggctcgagaaggtatattgctgttgacagtgagcgccagtgtgaagctcttgtcagatagtgaagccacagatgtatctgacaagagcttcacactgatgcctactgcctcggacttcaaggggctagaattcgagcaattatcttgtttactaaaactgaataccttgctatctctttgatacatttttacaaagctgaattaaaatggtataaattaaatcactttgacggtgacttaggagtatgccggatcaacgccctaggtttatgtttggatgaactgacatacgcgtatccgtctaaaaatcaatctcatttcctggtagtgaaatatatattaaaccaggaaatgagattgatttttttacggtaacgcggaattcgcaactattttatcaattttttgcgtcgacgactgtgacagcagagtatgccggatcaacgccctaggtttatgtttggatgaactgacatacgcgtatccgtcttatgtaaaagacaaacaatgcgtagtgaaatatatattaaacgcattgtttgtcttttacatattacggtaacgcggaattcgcaactattttatcaattttttgcgtcgaccggaactatcttgaagagtagtagtggactagtgtgacgctgctgacccctttctttcccttctacagatccaagctgtgaccggcgcctacacctgcagcccaagcttaccatggccttaccagtgaccgccttgctcctgccgctggccttgctgctccacgccgccaggcctgatattcagatgacacagagcccaagttcactgtcagcgagtgtcggagatcgggttactataacctgccgagcatctcaggatatcaataattacctggcctggtatcagcaaaaacccggcaaagtcccgaagctcctgatatacgcagcttcaacactgcaaagcggtgtgccctcgcgctttagcggctctggcagcgggacagatttcaccctgacgatttcctcccttcaacccgaggacgtggccacttactactccctcaactattactctgtaccctggacctttggccaagggacaaaggtggaaatcaagggctctactagcggttcagggaaacctgggagtggagagggctcgaccaagggacaggtccagctcgtggagtctggcggtgggctggttcagccagggaggagtttgcggctttcctgtacgggaagcggattcacctttggtgactatgccatgaactgggtcaggcaggctcctggaaaaggcctagagtgggtgggtttcatcagaaccaagccatatggcggcactacagaatatgcagccagcgtaaaagggagattcacgttcagccgcgacgactctaagtcaatagcttaccttcagatgaactccctcaagaccgaagacaccgccgtgtactattgtactatgatccctgtgctgcgttttttagagtggttgccttggggacaagggacattagttactgtgtcctccgcaaccacgacgccagcgccgcgaccaccaacaccggcgcccaccatcgcgtcgcagcccctgtccctgcgccctgaggcgtgcttcatgtacgtggcggcggccgcctttgtgcttctgttcttcgtgggctgcggggtgctgctgtcccgtaaacgcagacgtcaacacggtcaactgtggtttccagaaggttttaaggtctccgaagcaagtaagaagaaaagacgtgaaccactgggagaagatagcgtcggtctgaaaccactcaagaatgccatggtttctaaactgagccagctgcagacggagctcctggcggccctgctggagtcagggctgagcaaagaggcactgctccaggcactgggcgagccggggccctacctcctggctggagaaggccccctggacaagggggagtcctgcggcggcggtcgaggggagctggctgagctgcccaatgggctgggggagactcggggctccgaggacgagaccgacgacgatggggaagacttcacgccacccatcctcaaagagctggagaacctcagccctgaggaggcggcccaccagaaagccgtggtggagacccttctgcaggaggacccgtggcgtgtggcgaagatggtcaagtcctacctgcagcagcacaacatcccacagcgggaggtggtcgataccactggcctcaaccagtcccacctgtcccaacacctcaacaagggcactcccatgaagacgcagaagcgggccgccctgtacacctggtatgtccgcaagcagcgagaggtggcgcagcagttcacccatgcagggcagggagggctgattgaagagcccacaggagatgagctaccaaccaagaaggggcggaggaaccgtttcaagtggggcccagcatcccagcagatcctgttccaggcctatgagaggcagaagaaccctagcaaggaggagcgagaaacgctagtggaggagtgcaatagggcggaatgcatccagagaggtgtgtcaccatcacaagcacaaggtctgggctccaacctcgtcacggaggtgcgtgtctacaactggtttgccaaccggcgcaaagaagaagccttccggcacaagctggccatgacctgcagggatgagtttcccaccatggtgtttccttctgggcagatcagccaggcctcggccttggccccggcccctccccaagtcctgccccaggctccagcccctgcccctgctccagccatggtatcagctctggcccaggccccagcccctgtcccagtcctagccccaggccctcctcaagctgtggccccacctgcccccaagcccacccaagctggggaaggaacgctgtcagaggccctgctgcagctgcagtttgatgatgaagacctgggggccttgcttggcaacagcacagacccagctgtgttcacagacctggcatccgtcgacaactccgagtttcagcagctgctgaaccagggcatacctgtggccccccacacaactgagcccatgctgatggagtaccctgaggctataactcgcctagtgacaggggcccagaggccccccgacccagctcctgctccactgggggccccggggctccccaatggcctcctttcaggagatgaagacttctcctccattgcggacatggacttctcagccctgctgagtcagatcagctcctaaaggaaataaaagatctttaatgaaaatagatctgtgtgttggttttttgtgtgaataaaagatccagagctctagagatctgtgtgttggttttttgtgtgcgagggcaatctggcccatcaagtggccttcgcctctgggagtaacaaaaatgcacttcaaaatagcttctgtaatcaagctgcatgggtggagtactccccagctgactccaggaagttctctatccaaagctattcattaggccagagctgtgcaaataattagtcacccacttgctccataaccctccatgacagcccaggcattgagtccaggtgggaccatcaagccatgctctggtggctcatgcattatcatagaaatgggaggctttatttattttactaaaaagaacaaaaacaacagactgctgtcctttagacaataggatcacgtcatctgagccctctgtgccccaggtgacaagcccagccccaagttctctttcctcagcctccccacacatgttctggaggagatgggcccagcaggctgctctgaggcctggcccctcgtaagccaagcatggctc

SEQ ID NO: 1121 - DNA, 7712 bp, synthetic construct
  source 1..7712: mol_type = other DNA
gagccatgcttggcttacgagggcgaccaacccatcaaactccccgcccccagcacttttatttctcctctttaggaagtacacttcagtatctttggcacagtgcatgagcacgactaaagtaaaacatcgcagaaaacatagctttagtctacccttcgtgtcctaaaaggaaaaccagtagcttcccaggccaccggaagggcaacacatgtcctctgcagtttctgcacacgggaaggtaaagacagagagaggacctactcctcaacacagaaacatttcaaaatctttcctcgcctgcaacccaagctgaagtcattctccccagaaataacaaaagttggaagagaagccggagacaggataggtgcaggaagcccacactttgagggcagcactcagacaccctctcctgtgtgcaggacgtgccgaatgttcaggtgcaatgagaatgagccatgcttggcttataaggtacgactgtgccttctagttgccagccatctgttgtttgcccctcccccgtgccttccttgaccctggaaggtgccactcccactgtcctttcctaataaaatgaggaaattgcatcgcattgtctgagtaggtgtcattctattctggggggtggggtggggcaggacagcaagggggaggattgggaagacaatagcaggcatgctggggatgcggtgggctctatgggataagcttgatatcgaattcatcgatgttaataattaacatatatgttaatcattaacatatagttaattattaaccgctatgttaatgattaacaacggttaataattaacatatatgttaatcattaacatataactagtctagagggtatataatgggggccactagtctactaccagagttcatcgctagcgctaccggatccgccaccatggccctgccagtaacggctctgctgctgccacttgctctgctcctccatgcagccaggcctcaggtccagttggtacagagcggcgccgaagtgaaaaagcctggggcgtccgtcaaagtgtcttgcaaggcctccggctatacattcaccgggtactacatgcattgggtgcggcaggcacctggccagggtctagaatggatgggccggatcaatcccaactccggcggcacaaactatgctcagaaatttcaaggtcgcgtcaccatgacccgtgacacaagtacgagcaccgtctacatggagctgtcctccctcaggagcgaggatacagccgtgtactattgtgcaagggagcgcgccggctatagcagcgggcagttcgattattggggacaagggactctggtaactgtgtcctccggaggcggaggatcaggcggaggaggctcaggaggtggaggttctgacattcagatgactcaatctccctcgtcactgtcagctagtgttggggatagagtgactattacctgccgagccagtcagtcaatatctaactggctcgcatggtaccagcagaagccagggaaggctcccaaactgctgatctacgccgcgagcacccttcagaatggcgtgccgtctagatttagcggttctgggtctgggaccgactttacacttactatcagtagtttacaaccagaggactttgctacttattactgtcaacagagctacaccttccctattacgttcggccagggaacaaaagttgaaatcaaggcggcagcaaccacgacgccagcgccgcgaccaccaacaccggcgcccaccatcgcgtcgcagccactgtcactgcgcccagaagcgtgccggccagcggcggggggcgcagtgcatacgagggggctggacttcgcctgtgatatctacatctgggcgcccttggccgggacttgtggggtccttctcctgtcactggttatcaccctttactgcaaacggggcagaaagaaactcctgtatatattcaaacaaccatttatgagaccagtacaaactactcaagaagaggacggctgtagctgccgatttccagaagaagaagaaggaggatgtgaactgagagtgaagttcagcaggagcgcagacgcccccgcgtaccagcagggccagaaccagctctataacgagctcaatctaggacgaagagaggagtacgatgttttggacaagaggcgtggccgggaccctgagatggggggaaagccgagaaggaagaaccctcaggaaggcctgtacaatgaactgcagaaagataagatggcggaggcctacagtgagattgggatgaaaggcgagcgccggaggggcaaggggcacgatggcctttaccagggtctcagtacagccaccaaggacacctacgacgcccttcacatgcaggccctgccccctaggtaaaatcaacctctggattacaaaatttgtgaaagattgactggtattcttaactatgttgctccttttacgctatgtggatacgctgctttaatgcctttgtatcatgctattgcttcccgtatggctttcattttctcctccttgtataaatcctggttgctgtctctttatgaggagttgtggcccgttgtcaggcaacgtggcgtggtctgcactgtgtttgctgacgcaacccccactggttggggcattgccaccacctgtcagctcctttccgggactttcgctttccccctccctattgccacggcggaactcatcgccgcctgccttgcccgctgctggacaggggctcggctgttgggcactgacaattccgtggtgttgtcggggaaatcatcgtcctttccttggctgctcgcctgtgttgccacctggattctgcgcgggacgtccttctgctacgtcccttcggccctcaatccagcggaccttccttcccgcggcctgctgccggctctgcggcctcttccgcgtcttcgccttcgccctcagacgagtcggatctccctttgggccgcctccccgcctggatccttgacttgcggccaacttgtttattgcagcttataatggttacaaataaagcaatagcatcacaaatttcacaaataaagcatttttttcactgcattctagttgtggtttgtccaaactcatcaatgtatcttatcatgtctgggatccttgacttgcggccgcaactcccacctgcaacatgcgtgactgactgaggccgcgactctagagtcgaccggatctgcgatcgctccggtgcccgtcagtgggcagagcgcacatcgcccacagtccccgagaagttggggggaggggtcggcaattgaacgggtgcctagagaaggtggcgcggggtaaactgggaaagtgatgtcgtgtactggctccgcctttttcccgagggtgggggagaaccgtatataagtgcagtagtcgccgtgaacgttctttttcgcaacgggtttgccgccagaacacagctgaagcttcgaggggctcgcatctctccttcacgcgcccgccgccctacctgaggccgccatccacgccggttgagtcgcgttctgccgcctcccgcctgtggtgcctcctgaactgcgtccgccgtctaggtaagtcgactcgttggatccccactacccggatcaacgccctaggtttatgtttggatgaactgacatacgcgtatccgtcttaagaatcttttcaaacactagtagtgaaatatatattaaactagtgtttgaaaagattcttattacggtaacgcggaattcgcaactattttatcaattttttgcgtcgacacttcaaggggcttgcggccgcaaccatctccatggctgtttgaatgaggcttcagtactttacagaatcgttgcctgcacatcttggaaacacttgctgggattacttcgacttcttaacccaacagaaggctcgagaaggtatattgctgttgacagtgagcgccagtgtgaagctcttgtcagatagtgaagccacagatgtatctgacaagagcttcacactgatgcctactgcctcggacttcaaggggctagaattcgagcaattatcttgtttactaaaactgaataccttgctatctctttgatacatttttacaaagctgaattaaaatggtataaattaaatcactttgacggtgacttaggagtatgccggatcaacgccctaggtttatgtttggatgaactgacatacgcgtatccgtctaaaaatcaatctcatttcctggtagtgaaatatatattaaaccaggaaatgagattgatttttttacggtaacgcggaattcgcaactattttatcaattttttgcgtcgacgactgtgacagcagagtatgccggatcaacgccctaggtttatgtttggatgaactgacatacgcgtatccgtcttatgtaaaagacaaacaatgcgtagtgaaatatatattaaacgcattgtttgtcttttacatattacggtaacgcggaattcgcaactattttatcaattttttgcgtcgaccggaactatcttgaagagtagtagtggactagtgtgacgctgctgacccctttctttcccttctacagatccaagctgtgaccggcgcctacacctgcagcccaagcttaccatggccttaccagtgaccgccttgctcctgccgctggccttgctgctccacgccgccaggcctgagatagtcctgacccagtcacccgatttccagagtgttactcctaaggagaaagtgactataacatgccgggcatctcagtctgtcggaagcgggctacattggtaccagcagaagcctgaccagagcccgaaactgctcatcaaatatgcctcccagtcgttttctggcgtgccctctcgcttttccggaagcggatctggcacagacttcaccttgaccatcaatagcctggaaactgaggacgccgctacgtatttctgccagcagtcctccagtctgccttggacatttggtcagggaacgaaggtggagatcaagggttcaacatcagggagcgggaaaccgggctctggcgagggctcaacaaagggacaagtgcaactgcaagaatcgggacccgggctggttaaaccaagtgaaaccctttccctcacttgtaccgtaagcggcggtagcgtgtcctctggtagctactattggagttggattaggcaggcgccagggaaaggcctcgaatggattgggtatatctactacagcggcagtaactactacaacccatcattgaagtctagagtgacaattagtgtcgatacctctaaaaatcaattctcacttaagctgcgagctgtaaccgccgcagacactgcggtgtactattgtgcccgttggatgaccactatcaagggctacttcgattattggggacaagggacattagttacggtgtcctccgcaaccacgacgccagcgccgcgaccaccaacaccggcgcccaccatcgcgtcgcagcccctgtccctgcgccctgaggcgtgcttcatgtacgtggcggcggccgcctttgtgcttctgttcttcgtgggctgcggggtgctgctgtcccgtaaacgcagacgtcaacacggtcaactgtggtttccagaaggttttaaggtctccgaagcaagtaagaagaaaagacgtgaaccactgggagaagatagcgtcggtctgaaaccactcaagaatgccatggtttctaaactgagccagctgcagacggagctcctggcggccctgctggagtcagggctgagcaaagaggcactgctccaggcactgggcgagccggggccctacctcctggctggagaaggccccctggacaagggggagtcctgcggcggcggtcgaggggagctggctgagctgcccaatgggctgggggagactcggggctccgaggacgagaccgacgacgatggggaagacttcacgccacccatcctcaaagagctggagaacctcagccctgaggaggcggcccaccagaaagccgtggtggagacccttctgcaggaggacccgtggcgtgtggcgaagatggtcaagtcctacctgcagcagcacaacatcccacagcgggaggtggtcgataccactggcctcaaccagtcccacctgtcccaacacctcaacaagggcactcccatgaagacgcagaagcgggccgccctgtacacctggtatgtccgcaagcagcgagaggtggcgcagcagttcacccatgcagggcagggagggctgattgaagagcccacaggagatgagctaccaaccaagaaggggcggaggaaccgtttcaagtggggcccagcatcccagcagatcctgttccaggcctatgagaggcagaagaaccctagcaaggaggagcgagaaacgctagtggaggagtgcaatagggcggaatgcatccagagaggtgtgtcaccatcacaagcacaaggtctgggctccaacctcgtcacggaggtgcgtgtctacaactggtttgccaaccggcgcaaagaagaagccttccggcacaagctggccatgacctgcagggatgagtttcccaccatggtgtttccttctgggcagatcagccaggcctcggccttggccccggcccctccccaagtcctgccccaggctccagcccctgcccctgctccagccatggtatcagctctggcccaggccccagcccctgtcccagtcctagccccaggccctcctcaagctgtggccccacctgcccccaagcccacccaagctggggaaggaacgctgtcagaggccctgctgcagctgcagtttgatgatgaagacctgggggccttgcttggcaacagcacagacccagctgtgttcacagacctggcatccgtcgacaactccgagtttcagcagctgctgaaccagggcatacctgtggccccccacacaactgagcccatgctgatggagtaccctgaggctataactcgcctagtgacaggggcccagaggccccccgacccagctcctgctccactgggggccccggggctccccaatggcctcctttcaggagatgaagacttctcctccattgcggacatggacttctcagccctgctgagtcagatcagctcctaaaggaaataaaagatctttaatgaaaatagatctgtgtgttggttttttgtgtgaataaaagatccagagctctagagatctgtgtgttggttttttgtgtgcgagggcaatctggcccatcaagtggccttcgcctctgggagtaacaaaaatgcacttcaaaatagcttctgtaatcaagctgcatgggtggagtactccccagctgactccaggaagttctctatccaaagctattcattaggccagagctgtgcaaataattagtcacccacttgctccataaccctccatgacagcccaggcattgagtccaggtgggaccatcaagccatgctctggtggctcatgcattatcatagaaatgggaggctttatttattttactaaaaagaacaaaaacaacagactgctgtcctttagacaataggatcacgtcatctgagccctctgtgccccaggtgacaagcccagccccaagttctctttcctcagcctccccacacatgttctggaggagatgggcccagcaggctgctctgaggcctggcccctcgtaagccaagcatggctc

SEQ ID NO: 1122 - DNA, 8094 bp, synthetic construct
  source 1..8094: mol_type = other DNA
gagccatgcttggcttacgagggcgaccaacccatcaaactccccgcccccagcacttttatttctcctctttaggaagtacacttcagtatctttggcacagtgcatgagcacgactaaagtaaaacatcgcagaaaacatagctttagtctacccttcgtgtcctaaaaggaaaaccagtagcttcccaggccaccggaagggcaacacatgtcctctgcagtttctgcacacgggaaggtaaagacagagagaggacctactcctcaacacagaaacatttcaaaatctttcctcgcctgcaacccaagctgaagtcattctccccagaaataacaaaagttggaagagaagccggagacaggataggtgcaggaagcccacactttgagggcagcactcagacaccctctcctgtgtgcaggacgtgccgaatgttcaggtgcaatgagaatgagccatgcttggcttataaggtacgactgtgccttctagttgccagccatctgttgtttgcccctcccccgtgccttccttgaccctggaaggtgccactcccactgtcctttcctaataaaatgaggaaattgcatcgcattgtctgagtaggtgtcattctattctggggggtggggtggggcaggacagcaagggggaggattgggaagacaatagcaggcatgctggggatgcggtgggctctatgggataagcttgatatcgaattcatcgatgttaataattaacatatatgttaatcattaacatatagttaattattaaccgctatgttaatgattaacaacggttaataattaacatatatgttaatcattaacatataactagtctagagggtatataatgggggccactagtctactaccagagttcatcgctagcgctaccggatccgccaccatggccctgccagtaacggctctgctgctgccacttgctctgctcctccatgcagccaggcctcaggtccagttggtacagagcggcgccgaagtgaaaaagcctggggcgtccgtcaaagtgtcttgcaaggcctccggctatacattcaccgggtactacatgcattgggtgcggcaggcacctggccagggtctagaatggatgggccggatcaatcccaactccggcggcacaaactatgctcagaaatttcaaggtcgcgtcaccatgacccgtgacacaagtacgagcaccgtctacatggagctgtcctccctcaggagcgaggatacagccgtgtactattgtgcaagggagcgcgccggctatagcagcgggcagttcgattattggggacaagggactctggtaactgtgtcctccggaggcggaggatcaggcggaggaggctcaggaggtggaggttctgacattcagatgactcaatctccctcgtcactgtcagctagtgttggggatagagtgactattacctgccgagccagtcagtcaatatctaactggctcgcatggtaccagcagaagccagggaaggctcccaaactgctgatctacgccgcgagcacccttcagaatggcgtgccgtctagatttagcggttctgggtctgggaccgactttacacttactatcagtagtttacaaccagaggactttgctacttattactgtcaacagagctacaccttccctattacgttcggccagggaacaaaagttgaaatcaaggcggcagcaaccacgacgccagcgccgcgaccaccaacaccggcgcccaccatcgcgtcgcagccactgtcactgcgcccagaagcgtgccggccagcggcggggggcgcagtgcatacgagggggctggacttcgcctgtgatatctacatctgggcgcccttggccgggacttgtggggtccttctcctgtcactggttatcaccctttactgcaaacggggcagaaagaaactcctgtatatattcaaacaaccatttatgagaccagtacaaactactcaagaagaggacggctgtagctgccgatttccagaagaagaagaaggaggatgtgaactgagagtgaagttcagcaggagcgcagacgcccccgcgtaccagcagggccagaaccagctctataacgagctcaatctaggacgaagagaggagtacgatgttttggacaagaggcgtggccgggaccctgagatggggggaaagccgagaaggaagaaccctcaggaaggcctgtacaatgaactgcagaaagataagatggcggaggcctacagtgagattgggatgaaaggcgagcgccggaggggcaaggggcacgatggcctttaccagggtctcagtacagccaccaaggacacctacgacgcccttcacatgcaggccctgccccctaggtaaaatcaacctctggattacaaaatttgtgaaagattgactggtattcttaactatgttgctccttttacgctatgtggatacgctgctttaatgcctttgtatcatgctattgcttcccgtatggctttcattttctcctccttgtataaatcctggttgctgtctctttatgaggagttgtggcccgttgtcaggcaacgtggcgtggtctgcactgtgtttgctgacgcaacccccactggttggggcattgccaccacctgtcagctcctttccgggactttcgctttccccctccctattgccacggcggaactcatcgccgcctgccttgcccgctgctggacaggggctcggctgttgggcactgacaattccgtggtgttgtcggggaaatcatcgtcctttccttggctgctcgcctgtgttgccacctggattctgcgcgggacgtccttctgctacgtcccttcggccctcaatccagcggaccttccttcccgcggcctgctgccggctctgcggcctcttccgcgtcttcgccttcgccctcagacgagtcggatctccctttgggccgcctccccgcctggatccttgacttgcggccaacttgtttattgcagcttataatggttacaaataaagcaatagcatcacaaatttcacaaataaagcatttttttcactgcattctagttgtggtttgtccaaactcatcaatgtatcttatcatgtctgggatccttgacttgcggccgcaactcccacctgcaacatgcgtgactgactgaggccgcgactctagagtcgaccggatctgcgatcgctccggtgcccgtcagtgggcagagcgcacatcgcccacagtccccgagaagttggggggaggggtcggcaattgaacgggtgcctagagaaggtggcgcggggtaaactgggaaagtgatgtcgtgtactggctccgcctttttcccgagggtgggggagaaccgtatataagtgcagtagtcgccgtgaacgttctttttcgcaacgggtttgccgccagaacacagctgaagcttcgaggggctcgcatctctccttcacgcgcccgccgccctacctgaggccgccatccacgccggttgagtcgcgttctgccgcctcccgcctgtggtgcctcctgaactgcgtccgccgtctaggtaagtcgactcgttggatccccactacccggatcaacgccctaggtttatgtttggatgaactgacatacgcgtatccgtcttaagaatcttttcaaacactagtagtgaaatatatattaaactagtgtttgaaaagattcttattacggtaacgcggaattcgcaactattttatcaattttttgcgtcgacacttcaaggggcttgcggccgcaaccatctccatggctgtttgaatgaggcttcagtactttacagaatcgttgcctgcacatcttggaaacacttgctgggattacttcgacttcttaacccaacagaaggctcgagaaggtatattgctgttgacagtgagcgccagtgtgaagctcttgtcagatagtgaagccacagatgtatctgacaagagcttcacactgatgcctactgcctcggacttcaaggggctagaattcgagcaattatcttgtttactaaaactgaataccttgctatctctttgatacatttttacaaagctgaattaaaatggtataaattaaatcactttgacggtgacttaggagtatgccggatcaacgccctaggtttatgtttggatgaactgacatacgcgtatccgtctaaaaatcaatctcatttcctggtagtgaaatatatattaaaccaggaaatgagattgatttttttacggtaacgcggaattcgcaactattttatcaattttttgcgtcgacgactgtgacagcagagtatgccggatcaacgccctaggtttatgtttggatgaactgacatacgcgtatccgtcttatgtaaaagacaaacaatgcgtagtgaaatatatattaaacgcattgtttgtcttttacatattacggtaacgcggaattcgcaactattttatcaattttttgcgtcgaccggaactatcttgaagagtagtagtggactagtgtgacgctgctgacccctttctttcccttctacagatccaagctgtgaccggcgcctacacctgcagcccaagcttaccatggccttaccagtgaccgccttgctcctgccgctggccttgctgctccacgccgccaggcctgaaatcgtcctgacacagtctccagattttcagagcgtgacgccaaaggagaaagtgacaattacatgccgggcatctcagtctgttgggtctgggttgcattggtatcagcaaaagcccgaccagtcacccaaactgctcatcaaatatgcaagccagagtttttcaggcgtaccttcacgatttagcggaagtggttctggcactgacttcaccttgacgattaatagcctggaagtagaagacgctgccactttctactgcctgcaaagtagctccctgccctggacttttgggcagggtactaaggtcgagatcaagggctcgacaagcggaagtggcaaaccgggcagcggcgagggaagcaccaagggacaagtgcaactgcaagagtctggacccgggctggtgaaaccaagcgagacattatccctcacttgtaccgtgtcaggcggtagtgtgtcctccgggaatttctactggagttggatacgccagcctcctgggaagggccttgaatggattggctacatctactattcaggctccacctactacaacccgtctttgaagtcaagggttacgataagcgtcgatacctccaaaaaccaattctccctaaagctcagatcgttaactgccgctgataccgcggtgtactattgtgcccgttggatgaccaaagttaagggttatttcgactattggggacaagggacacttgtcaccgtgtcctccgcaaccacgacgccagcgccgcgaccaccaacaccggcgcccaccatcgcgtcgcagcccctgtccctgcgccctgaggcgtgcttcatgtacgtggcggcggccgcctttgtgcttctgttcttcgtgggctgcggggtgctgctgtcccgtaaacgcagacgtcaacacggtcaactgtggtttccagaaggttttaaggtctccgaagcaagtaagaagaaaagacgtgaaccactgggagaagatagcgtcggtctgaaaccactcaagaatgccatggtttctaaactgagccagctgcagacggagctcctggcggccctgctggagtcagggctgagcaaagaggcactgctccaggcactgggcgagccggggccctacctcctggctggagaaggccccctggacaagggggagtcctgcggcggcggtcgaggggagctggctgagctgcccaatgggctgggggagactcggggctccgaggacgagaccgacgacgatggggaagacttcacgccacccatcctcaaagagctggagaacctcagccctgaggaggcggcccaccagaaagccgtggtggagacccttctgcaggaggacccgtggcgtgtggcgaagatggtcaagtcctacctgcagcagcacaacatcccacagcgggaggtggtcgataccactggcctcaaccagtcccacctgtcccaacacctcaacaagggcactcccatgaagacgcagaagcgggccgccctgtacacctggtatgtccgcaagcagcgagaggtggcgcagcagttcacccatgcagggcagggagggctgattgaagagcccacaggagatgagctaccaaccaagaaggggcggaggaaccgtttcaagtggggcccagcatcccagcagatcctgttccaggcctatgagaggcagaagaaccctagcaaggaggagcgagaaacgctagtggaggagtgcaatagggcggaatgcatccagagaggtgtgtcaccatcacaagcacaaggtctgggctccaacctcgtcacggaggtgcgtgtctacaactggtttgccaaccggcgcaaagaagaagccttccggcacaagctggccatgacctgcagggatgagtttcccaccatggtgtttccttctgggcagatcagccaggcctcggccttggccccggcccctccccaagtcctgccccaggctccagcccctgcccctgctccagccatggtatcagctctggcccaggccccagcccctgtcccagtcctagccccaggccctcctcaagctgtggccccacctgcccccaagcccacccaagctggggaaggaacgctgtcagaggccctgctgcagctgcagtttgatgatgaagacctgggggccttgcttggcaacagcacagacccagctgtgttcacagacctggcatccgtcgacaactccgagtttcagcagctgctgaaccagggcatacctgtggccccccacacaactgagcccatgctgatggagtaccctgaggctataactcgcctagtgacaggggcccagaggccccccgacccagctcctgctccactgggggccccggggctccccaatggcctcctttcaggagatgaagacttctcctccattgcggacatggacttctcagccctgctgagtcagatcagctcctaaaggacgggtggcatccctgtgacccctccccagtgcctctcctggccctggaagttgccactccagtgcccaccagccttgtcctaataaaattaagttgcatcattttgtctgactaggtgtccttctataatattatggggtggaggggggtggtatggagcaaggggcaagttgggaagacaacctgtagggcctgcggggtctattgggaaccaagctggagtgcagtggcacaatcttggctcactgcaatctccgcctcctgggttcaagcgattctcctgcctcagcctcccgagttgttgggattccaggcatgcatgaccaggctcagctaatttttgtttttttggtagaaacggggtttcaccatattggccaggctggtctccaactcctaatctcaggtgatctacccaccttggcctcccaaattgctgggattacaggcgtgaaccactgctcccttccctgtccttccgagggcaatctggcccatcaagtggccttcgcctctgggagtaacaaaaatgcacttcaaaatagcttctgtaatcaagctgcatgggtggagtactccccagctgactccaggaagttctctatccaaagctattcattaggccagagctgtgcaaataattagtcacccacttgctccataaccctccatgacagcccaggcattgagtccaggtgggaccatcaagccatgctctggtggctcatgcattatcatagaaatgggaggctttatttattttactaaaaagaacaaaaacaacagactgctgtcctttagacaataggatcacgtcatctgagccctctgtgccccaggtgacaagcccagccccaagttctctttcctcagcctccccacacatgttctggaggagatgggcccagcaggctgctctgaggcctggcccctcgtaagccaagcatggctc

SEQ ID NO: 1123 - DNA, 8109 bp, synthetic construct
  source 1..8109: mol_type = other DNA
gagccatgcttggcttacgagggcgaccaacccatcaaactccccgcccccagcacttttatttctcctctttaggaagtacacttcagtatctttggcacagtgcatgagcacgactaaagtaaaacatcgcagaaaacatagctttagtctacccttcgtgtcctaaaaggaaaaccagtagcttcccaggccaccggaagggcaacacatgtcctctgcagtttctgcacacgggaaggtaaagacagagagaggacctactcctcaacacagaaacatttcaaaatctttcctcgcctgcaacccaagctgaagtcattctccccagaaataacaaaagttggaagagaagccggagacaggataggtgcaggaagcccacactttgagggcagcactcagacaccctctcctgtgtgcaggacgtgccgaatgttcaggtgcaatgagaatgagccatgcttggcttataaggtacgactgtgccttctagttgccagccatctgttgtttgcccctcccccgtgccttccttgaccctggaaggtgccactcccactgtcctttcctaataaaatgaggaaattgcatcgcattgtctgagtaggtgtcattctattctggggggtggggtggggcaggacagcaagggggaggattgggaagacaatagcaggcatgctggggatgcggtgggctctatgggataagcttgatatcgaattcatcgatgttaataattaacatatatgttaatcattaacatatagttaattattaaccgctatgttaatgattaacaacggttaataattaacatatatgttaatcattaacatataactagtctagagggtatataatgggggccactagtctactaccagagttcatcgctagcgctaccggatccgccaccatggccctgccagtaacggctctgctgctgccacttgctctgctcctccatgcagccaggcctcaagtgcagctggtccagtctggggcggaagtgaaaaagcccggagctagtgtaaaggtgtcctgtaaagccagcggctacaccttcaccggttattacctgcattgggtccggcaggctcctggccagggcctggagtggatgggctggatttccgcatataacggaaacacaaattacgcccagaacctgcaaggccgcgtgaccatgaccagggacacaagcactagcactgtctacatggagttgtctagcttgagaagcgaagataccgctgtgtactattgcgcccgacactcttactcgggctcatactcaacgctaccctattatgggatggatgtttggggtcaagggacaacggtcacagtatcctctggaggcggtggcagcggaggaggcgggtctggaggtggtggatcagacattcagatgacccagtcaccaagttccttatccgcaagcgttggggatcgtgttacaattacttgcagggcctcgcaagggatctctaattatctcgcttggtaccagcagaaacctgggaaagcacccaagctgctgatctacactgcaagcacactttttccaggagtgccgtcaagattctctgggtccgggagtggcactgacttcacccttaccatctcctccctccagcctgaggactttgccacatattattgtcaacagagttactccataccactcacgtttggcggcggaacaaaagttgaaatcaaggcggcagcaaccacgacgccagcgccgcgaccaccaacaccggcgcccaccatcgcgtcgcagccactgtcactgcgcccagaagcgtgccggccagcggcggggggcgcagtgcatacgagggggctggacttcgcctgtgatatctacatctgggcgcccttggccgggacttgtggggtccttctcctgtcactggttatcaccctttactgcaaacggggcagaaagaaactcctgtatatattcaaacaaccatttatgagaccagtacaaactactcaagaagaggacggctgtagctgccgatttccagaagaagaagaaggaggatgtgaactgagagtgaagttcagcaggagcgcagacgcccccgcgtaccagcagggccagaaccagctctataacgagctcaatctaggacgaagagaggagtacgatgttttggacaagaggcgtggccgggaccctgagatggggggaaagccgagaaggaagaaccctcaggaaggcctgtacaatgaactgcagaaagataagatggcggaggcctacagtgagattgggatgaaaggcgagcgccggaggggcaaggggcacgatggcctttaccagggtctcagtacagccaccaaggacacctacgacgcccttcacatgcaggccctgccccctaggtaaaatcaacctctggattacaaaatttgtgaaagattgactggtattcttaactatgttgctccttttacgctatgtggatacgctgctttaatgcctttgtatcatgctattgcttcccgtatggctttcattttctcctccttgtataaatcctggttgctgtctctttatgaggagttgtggcccgttgtcaggcaacgtggcgtggtctgcactgtgtttgctgacgcaacccccactggttggggcattgccaccacctgtcagctcctttccgggactttcgctttccccctccctattgccacggcggaactcatcgccgcctgccttgcccgctgctggacaggggctcggctgttgggcactgacaattccgtggtgttgtcggggaaatcatcgtcctttccttggctgctcgcctgtgttgccacctggattctgcgcgggacgtccttctgctacgtcccttcggccctcaatccagcggaccttccttcccgcggcctgctgccggctctgcggcctcttccgcgtcttcgccttcgccctcagacgagtcggatctccctttgggccgcctccccgcctggatccttgacttgcggccaacttgtttattgcagcttataatggttacaaataaagcaatagcatcacaaatttcacaaataaagcatttttttcactgcattctagttgtggtttgtccaaactcatcaatgtatcttatcatgtctgggatccttgacttgcggccgcaactcccacctgcaacatgcgtgactgactgaggccgcgactctagagtcgaccggatctgcgatcgctccggtgcccgtcagtgggcagagcgcacatcgcccacagtccccgagaagttggggggaggggtcggcaattgaacgggtgcctagagaaggtggcgcggggtaaactgggaaagtgatgtcgtgtactggctccgcctttttcccgagggtgggggagaaccgtatataagtgcagtagtcgccgtgaacgttctttttcgcaacgggtttgccgccagaacacagctgaagcttcgaggggctcgcatctctccttcacgcgcccgccgccctacctgaggccgccatccacgccggttgagtcgcgttctgccgcctcccgcctgtggtgcctcctgaactgcgtccgccgtctaggtaagtcgactcgttggatccccactacccggatcaacgccctaggtttatgtttggatgaactgacatacgcgtatccgtcttaagaatcttttcaaacactagtagtgaaatatatattaaactagtgtttgaaaagattcttattacggtaacgcggaattcgcaactattttatcaattttttgcgtcgacacttcaaggggcttgcggccgcaaccatctccatggctgtttgaatgaggcttcagtactttacagaatcgttgcctgcacatcttggaaacacttgctgggattacttcgacttcttaacccaacagaaggctcgagaaggtatattgctgttgacagtgagcgccagtgtgaagctcttgtcagatagtgaagccacagatgtatctgacaagagcttcacactgatgcctactgcctcggacttcaaggggctagaattcgagcaattatcttgtttactaaaactgaataccttgctatctctttgatacatttttacaaagctgaattaaaatggtataaattaaatcactttgacggtgacttaggagtatgccggatcaacgccctaggtttatgtttggatgaactgacatacgcgtatccgtctaaaaatcaatctcatttcctggtagtgaaatatatattaaaccaggaaatgagattgatttttttacggtaacgcggaattcgcaactattttatcaattttttgcgtcgacgactgtgacagcagagtatgccggatcaacgccctaggtttatgtttggatgaactgacatacgcgtatccgtcttatgtaaaagacaaacaatgcgtagtgaaatatatattaaacgcattgtttgtcttttacatattacggtaacgcggaattcgcaactattttatcaattttttgcgtcgaccggaactatcttgaagagtagtagtggactagtgtgacgctgctgacccctttctttcccttctacagatccaagctgtgaccggcgcctacacctgcagcccaagcttaccatggccttaccagtgaccgccttgctcctgccgctggccttgctgctccacgccgccaggcctgagatagtcctgacccagtcacccgatttccagagtgttactcctaaggagaaagtgactataacatgccgggcatctcagtctgtcggaagcgggctacattggtaccagcagaagcctgaccagagcccgaaactgctcatcaaatatgcctcccagtcgttttctggcgtgccctctcgcttttccggaagcggatctggcacagacttcaccttgaccatcaatagcctggaaactgaggacgccgctacgtatttctgccagcagtcctccagtctgccttggacatttggtcagggaacgaaggtggagatcaagggttcaacatcagggagcgggaaaccgggctctggcgagggctcaacaaagggacaagtgcaactgcaagaatcgggacccgggctggttaaaccaagtgaaaccctttccctcacttgtaccgtaagcggcggtagcgtgtcctctggtagctactattggagttggattaggcaggcgccagggaaaggcctcgaatggattgggtatatctactacagcggcagtaactactacaacccatcattgaagtctagagtgacaattagtgtcgatacctctaaaaatcaattctcacttaagctgcgagctgtaaccgccgcagacactgcggtgtactattgtgcccgttggatgaccactatcaagggctacttcgattattggggacaagggacattagttacggtgtcctccgcaaccacgacgccagcgccgcgaccaccaacaccggcgcccaccatcgcgtcgcagcccctgtccctgcgccctgaggcgtgcttcatgtacgtggcggcggccgcctttgtgcttctgttcttcgtgggctgcggggtgctgctgtcccgtaaacgcagacgtcaacacggtcaactgtggtttccagaaggttttaaggtctccgaagcaagtaagaagaaaagacgtgaaccactgggagaagatagcgtcggtctgaaaccactcaagaatgccatggtttctaaactgagccagctgcagacggagctcctggcggccctgctggagtcagggctgagcaaagaggcactgctccaggcactgggcgagccggggccctacctcctggctggagaaggccccctggacaagggggagtcctgcggcggcggtcgaggggagctggctgagctgcccaatgggctgggggagactcggggctccgaggacgagaccgacgacgatggggaagacttcacgccacccatcctcaaagagctggagaacctcagccctgaggaggcggcccaccagaaagccgtggtggagacccttctgcaggaggacccgtggcgtgtggcgaagatggtcaagtcctacctgcagcagcacaacatcccacagcgggaggtggtcgataccactggcctcaaccagtcccacctgtcccaacacctcaacaagggcactcccatgaagacgcagaagcgggccgccctgtacacctggtatgtccgcaagcagcgagaggtggcgcagcagttcacccatgcagggcagggagggctgattgaagagcccacaggagatgagctaccaaccaagaaggggcggaggaaccgtttcaagtggggcccagcatcccagcagatcctgttccaggcctatgagaggcagaagaaccctagcaaggaggagcgagaaacgctagtggaggagtgcaatagggcggaatgcatccagagaggtgtgtcaccatcacaagcacaaggtctgggctccaacctcgtcacggaggtgcgtgtctacaactggtttgccaaccggcgcaaagaagaagccttccggcacaagctggccatgacctgcagggatgagtttcccaccatggtgtttccttctgggcagatcagccaggcctcggccttggccccggcccctccccaagtcctgccccaggctccagcccctgcccctgctccagccatggtatcagctctggcccaggccccagcccctgtcccagtcctagccccaggccctcctcaagctgtggccccacctgcccccaagcccacccaagctggggaaggaacgctgtcagaggccctgctgcagctgcagtttgatgatgaagacctgggggccttgcttggcaacagcacagacccagctgtgttcacagacctggcatccgtcgacaactccgagtttcagcagctgctgaaccagggcatacctgtggccccccacacaactgagcccatgctgatggagtaccctgaggctataactcgcctagtgacaggggcccagaggccccccgacccagctcctgctccactgggggccccggggctccccaatggcctcctttcaggagatgaagacttctcctccattgcggacatggacttctcagccctgctgagtcagatcagctcctaaaggacgggtggcatccctgtgacccctccccagtgcctctcctggccctggaagttgccactccagtgcccaccagccttgtcctaataaaattaagttgcatcattttgtctgactaggtgtccttctataatattatggggtggaggggggtggtatggagcaaggggcaagttgggaagacaacctgtagggcctgcggggtctattgggaaccaagctggagtgcagtggcacaatcttggctcactgcaatctccgcctcctgggttcaagcgattctcctgcctcagcctcccgagttgttgggattccaggcatgcatgaccaggctcagctaatttttgtttttttggtagaaacggggtttcaccatattggccaggctggtctccaactcctaatctcaggtgatctacccaccttggcctcccaaattgctgggattacaggcgtgaaccactgctcccttccctgtccttccgagggcaatctggcccatcaagtggccttcgcctctgggagtaacaaaaatgcacttcaaaatagcttctgtaatcaagctgcatgggtggagtactccccagctgactccaggaagttctctatccaaagctattcattaggccagagctgtgcaaataattagtcacccacttgctccataaccctccatgacagcccaggcattgagtccaggtgggaccatcaagccatgctctggtggctcatgcattatcatagaaatgggaggctttatttattttactaaaaagaacaaaaacaacagactgctgtcctttagacaataggatcacgtcatctgagccctctgtgccccaggtgacaagcccagccccaagttctctttcctcagcctccccacacatgttctggaggagatgggcccagcaggctgctctgaggcctggcccctcgtaagccaagcatggctc

SEQ ID NO: 1124 - DNA, 8094 bp, synthetic construct
  source 1..8094: mol_type = other DNA
gagccatgcttggcttacgagggcgaccaacccatcaaactccccgcccccagcacttttatttctcctctttaggaagtacacttcagtatctttggcacagtgcatgagcacgactaaagtaaaacatcgcagaaaacatagctttagtctacccttcgtgtcctaaaaggaaaaccagtagcttcccaggccaccggaagggcaacacatgtcctctgcagtttctgcacacgggaaggtaaagacagagagaggacctactcctcaacacagaaacatttcaaaatctttcctcgcctgcaacccaagctgaagtcattctccccagaaataacaaaagttggaagagaagccggagacaggataggtgcaggaagcccacactttgagggcagcactcagacaccctctcctgtgtgcaggacgtgccgaatgttcaggtgcaatgagaatgagccatgcttggcttataaggtacgactgtgccttctagttgccagccatctgttgtttgcccctcccccgtgccttccttgaccctggaaggtgccactcccactgtcctttcctaataaaatgaggaaattgcatcgcattgtctgagtaggtgtcattctattctggggggtggggtggggcaggacagcaagggggaggattgggaagacaatagcaggcatgctggggatgcggtgggctctatgggataagcttgatatcgaattcatcgatgttaataattaacatatatgttaatcattaacatatagttaattattaaccgctatgttaatgattaacaacggttaataattaacatatatgttaatcattaacatataactagtctagagggtatataatgggggccactagtctactaccagagttcatcgctagcgctaccggatccgccaccatggccctgccagtaacggctctgctgctgccacttgctctgctcctccatgcagccaggcctcaggtccagttggtacagagcggcgccgaagtgaaaaagcctggggcgtccgtcaaagtgtcttgcaaggcctccggctatacattcaccgggtactacatgcattgggtgcggcaggcacctggccagggtctagaatggatgggccggatcaatcccaactccggcggcacaaactatgctcagaaatttcaaggtcgcgtcaccatgacccgtgacacaagtacgagcaccgtctacatggagctgtcctccctcaggagcgaggatacagccgtgtactattgtgcaagggagcgcgccggctatagcagcgggcagttcgattattggggacaagggactctggtaactgtgtcctccggaggcggaggatcaggcggaggaggctcaggaggtggaggttctgacattcagatgactcaatctccctcgtcactgtcagctagtgttggggatagagtgactattacctgccgagccagtcagtcaatatctaactggctcgcatggtaccagcagaagccagggaaggctcccaaactgctgatctacgccgcgagcacccttcagaatggcgtgccgtctagatttagcggttctgggtctgggaccgactttacacttactatcagtagtttacaaccagaggactttgctacttattactgtcaacagagctacaccttccctattacgttcggccagggaacaaaagttgaaatcaaggcggcagcaaccacgacgccagcgccgcgaccaccaacaccggcgcccaccatcgcgtcgcagccactgtcactgcgcccagaagcgtgccggccagcggcggggggcgcagtgcatacgagggggctggacttcgcctgtgatatctacatctgggcgcccttggccgggacttgtggggtccttctcctgtcactggttatcaccctttactgcaaacggggcagaaagaaactcctgtatatattcaaacaaccatttatgagaccagtacaaactactcaagaagaggacggctgtagctgccgatttccagaagaagaagaaggaggatgtgaactgagagtgaagttcagcaggagcgcagacgcccccgcgtaccagcagggccagaaccagctctataacgagctcaatctaggacgaagagaggagtacgatgttttggacaagaggcgtggccgggaccctgagatggggggaaagccgagaaggaagaaccctcaggaaggcctgtacaatgaactgcagaaagataagatggcggaggcctacagtgagattgggatgaaaggcgagcgccggaggggcaaggggcacgatggcctttaccagggtctcagtacagccaccaaggacacctacgacgcccttcacatgcaggccctgccccctaggtaaaatcaacctctggattacaaaatttgtgaaagattgactggtattcttaactatgttgctccttttacgctatgtggatacgctgctttaatgcctttgtatcatgctattgcttcccgtatggctttcattttctcctccttgtataaatcctggttgctgtctctttatgaggagttgtggcccgttgtcaggcaacgtggcgtggtctgcactgtgtttgctgacgcaacccccactggttggggcattgccaccacctgtcagctcctttccgggactttcgctttccccctccctattgccacggcggaactcatcgccgcctgccttgcccgctgctggacaggggctcggctgttgggcactgacaattccgtggtgttgtcggggaaatcatcgtcctttccttggctgctcgcctgtgttgccacctggattctgcgcgggacgtccttctgctacgtcccttcggccctcaatccagcggaccttccttcccgcggcctgctgccggctctgcggcctcttccgcgtcttcgccttcgccctcagacgagtcggatctccctttgggccgcctccccgcctggatccttgacttgcggccaacttgtttattgcagcttataatggttacaaataaagcaatagcatcacaaatttcacaaataaagcatttttttcactgcattctagttgtggtttgtccaaactcatcaatgtatcttatcatgtctgggatccttgacttgcggccgcaactcccacctgcaacatgcgtgactgactgaggccgcgactctagagtcgaccggatctgcgatcgctccggtgcccgtcagtgggcagagcgcacatcgcccacagtccccgagaagttggggggaggggtcggcaattgaacgggtgcctagagaaggtggcgcggggtaaactgggaaagtgatgtcgtgtactggctccgcctttttcccgagggtgggggagaaccgtatataagtgcagtagtcgccgtgaacgttctttttcgcaacgggtttgccgccagaacacagctgaagcttcgaggggctcgcatctctccttcacgcgcccgccgccctacctgaggccgccatccacgccggttgagtcgcgttctgccgcctcccgcctgtggtgcctcctgaactgcgtccgccgtctaggtaagtcgactcgttggatccccactacccggatcaacgccctaggtttatgtttggatgaactgacatacgcgtatccgtcttaagaatcttttcaaacactagtagtgaaatatatattaaactagtgtttgaaaagattcttattacggtaacgcggaattcgcaactattttatcaattttttgcgtcgacacttcaaggggcttgcggccgcaaccatctccatggctgtttgaatgaggcttcagtactttacagaatcgttgcctgcacatcttggaaacacttgctgggattacttcgacttcttaacccaacagaaggctcgagaaggtatattgctgttgacagtgagcgccagtgtgaagctcttgtcagatagtgaagccacagatgtatctgacaagagcttcacactgatgcctactgcctcggacttcaaggggctagaattcgagcaattatcttgtttactaaaactgaataccttgctatctctttgatacatttttacaaagctgaattaaaatggtataaattaaatcactttgacggtgacttaggagtatgccggatcaacgccctaggtttatgtttggatgaactgacatacgcgtatccgtctaaaaatcaatctcatttcctggtagtgaaatatatattaaaccaggaaatgagattgatttttttacggtaacgcggaattcgcaactattttatcaattttttgcgtcgacgactgtgacagcagagtatgccggatcaacgccctaggtttatgtttggatgaactgacatacgcgtatccgtcttatgtaaaagacaaacaatgcgtagtgaaatatatattaaacgcattgtttgtcttttacatattacggtaacgcggaattcgcaactattttatcaattttttgcgtcgaccggaactatcttgaagagtagtagtggactagtgtgacgctgctgacccctttctttcccttctacagatccaagctgtgaccggcgcctacacctgcagcccaagcttaccatggccttaccagtgaccgccttgctcctgccgctggccttgctgctccacgccgccaggcctgagatagtcctgacccagtcacccgatttccagagtgttactcctaaggagaaagtgactataacatgccgggcatctcagtctgtcggaagcgggctacattggtaccagcagaagcctgaccagagcccgaaactgctcatcaaatatgcctcccagtcgttttctggcgtgccctctcgcttttccggaagcggatctggcacagacttcaccttgaccatcaatagcctggaaactgaggacgccgctacgtatttctgccagcagtcctccagtctgccttggacatttggtcagggaacgaaggtggagatcaagggttcaacatcagggagcgggaaaccgggctctggcgagggctcaacaaagggacaagtgcaactgcaagaatcgggacccgggctggttaaaccaagtgaaaccctttccctcacttgtaccgtaagcggcggtagcgtgtcctctggtagctactattggagttggattaggcaggcgccagggaaaggcctcgaatggattgggtatatctactacagcggcagtaactactacaacccatcattgaagtctagagtgacaattagtgtcgatacctctaaaaatcaattctcacttaagctgcgagctgtaaccgccgcagacactgcggtgtactattgtgcccgttggatgaccactatcaagggctacttcgattattggggacaagggacattagttacggtgtcctccgcaaccacgacgccagcgccgcgaccaccaacaccggcgcccaccatcgcgtcgcagcccctgtccctgcgccctgaggcgtgcttcatgtacgtggcggcggccgcctttgtgcttctgttcttcgtgggctgcggggtgctgctgtcccgtaaacgcagacgtcaacacggtcaactgtggtttccagaaggttttaaggtctccgaagcaagtaagaagaaaagacgtgaaccactgggagaagatagcgtcggtctgaaaccactcaagaatgccatggtttctaaactgagccagctgcagacggagctcctggcggccctgctggagtcagggctgagcaaagaggcactgctccaggcactgggcgagccggggccctacctcctggctggagaaggccccctggacaagggggagtcctgcggcggcggtcgaggggagctggctgagctgcccaatgggctgggggagactcggggctccgaggacgagaccgacgacgatggggaagacttcacgccacccatcctcaaagagctggagaacctcagccctgaggaggcggcccaccagaaagccgtggtggagacccttctgcaggaggacccgtggcgtgtggcgaagatggtcaagtcctacctgcagcagcacaacatcccacagcgggaggtggtcgataccactggcctcaaccagtcccacctgtcccaacacctcaacaagggcactcccatgaagacgcagaagcgggccgccctgtacacctggtatgtccgcaagcagcgagaggtggcgcagcagttcacccatgcagggcagggagggctgattgaagagcccacaggagatgagctaccaaccaagaaggggcggaggaaccgtttcaagtggggcccagcatcccagcagatcctgttccaggcctatgagaggcagaagaaccctagcaaggaggagcgagaaacgctagtggaggagtgcaatagggcggaatgcatccagagaggtgtgtcaccatcacaagcacaaggtctgggctccaacctcgtcacggaggtgcgtgtctacaactggtttgccaaccggcgcaaagaagaagccttccggcacaagctggccatgacctgcagggatgagtttcccaccatggtgtttccttctgggcagatcagccaggcctcggccttggccccggcccctccccaagtcctgccccaggctccagcccctgcccctgctccagccatggtatcagctctggcccaggccccagcccctgtcccagtcctagccccaggccctcctcaagctgtggccccacctgcccccaagcccacccaagctggggaaggaacgctgtcagaggccctgctgcagctgcagtttgatgatgaagacctgggggccttgcttggcaacagcacagacccagctgtgttcacagacctggcatccgtcgacaactccgagtttcagcagctgctgaaccagggcatacctgtggccccccacacaactgagcccatgctgatggagtaccctgaggctataactcgcctagtgacaggggcccagaggccccccgacccagctcctgctccactgggggccccggggctccccaatggcctcctttcaggagatgaagacttctcctccattgcggacatggacttctcagccctgctgagtcagatcagctcctaaaggacgggtggcatccctgtgacccctccccagtgcctctcctggccctggaagttgccactccagtgcccaccagccttgtcctaataaaattaagttgcatcattttgtctgactaggtgtccttctataatattatggggtggaggggggtggtatggagcaaggggcaagttgggaagacaacctgtagggcctgcggggtctattgggaaccaagctggagtgcagtggcacaatcttggctcactgcaatctccgcctcctgggttcaagcgattctcctgcctcagcctcccgagttgttgggattccaggcatgcatgaccaggctcagctaatttttgtttttttggtagaaacggggtttcaccatattggccaggctggtctccaactcctaatctcaggtgatctacccaccttggcctcccaaattgctgggattacaggcgtgaaccactgctcccttccctgtccttccgagggcaatctggcccatcaagtggccttcgcctctgggagtaacaaaaatgcacttcaaaatagcttctgtaatcaagctgcatgggtggagtactccccagctgactccaggaagttctctatccaaagctattcattaggccagagctgtgcaaataattagtcacccacttgctccataaccctccatgacagcccaggcattgagtccaggtgggaccatcaagccatgctctggtggctcatgcattatcatagaaatgggaggctttatttattttactaaaaagaacaaaaacaacagactgctgtcctttagacaataggatcacgtcatctgagccctctgtgccccaggtgacaagcccagccccaagttctctttcctcagcctccccacacatgttctggaggagatgggcccagcaggctgctctgaggcctggcccctcgtaagccaagcatggctc

SEQ ID NO: 1125 - protein, 107 aa, synthetic construct
DIQMTQSPSSLSASVGDRVTITCRASQDINNYLAWYQQKPGKVPKLLIYAASTLQSGVPSRFSGSGSGTDFTLTISSLQPEDVATYYSLNYYSVPWTFGQGTKVEIK

SEQ ID NO: 1126 - protein, 246 aa, synthetic construct
QVQLQESGPGLVKPSETLSLTCTVSGGSVSSGNFYWSWIRQPPGKGLEWIGYIYYSGSTYYNPSLKSRVTISVDTSKNQFSLKLRSLTAADTAVYYCARWMTKVKGYFDYWGQGTLVTVSSGSTSGSGKPGSGEGSTKGEIVLTQSPDFQSVTPKEKVTITCRASQSVGSGLHWYQQKPDQSPKLLIKYASQSFSGVPSRFSGSGSGTDFTLTINSLEVEDAATFYCLQSSSLPWTFGQGTKVEIK

SEQ ID NO: 1127 - protein, 246 aa, synthetic construct
QVQLQESGPGLVKPSETLSLTCTVSGGSVSSGSYYWSWIRQAPGKGLEWIGYIYYSGSNYYNPSLKSRVTISVDTSKNQFSLKLRAVTAADTAVYYCARWMTTIKGYFDYWGQGTLVTVSSGSTSGSGKPGSGEGSTKGEIVLTQSPDFQSVTPKEKVTITCRASQSVGSGLHWYQQKPDQSPKLLIKYASQSFSGVPSRFSGSGSGTDFTLTINSLETEDAATYFCQQSSSLPWTFGQGTKVEIK

SEQ ID NO: 1128 - protein, 247 aa, synthetic construct
QVQLVESGGGLVQPGRSLRLSCTGSGFTFGDYAMNWVRQAPGKGLEWVGFIRTKPYGGTTEYAASVKGRFTFSRDDSKSIAYLQMNSLKTEDTAVYYCTMIPVLRFLEWLPWGQGTLVTVSSGSTSGSGKPGSGEGSTKGDIQMTQSPSSLSASVGDRVTITCRASQDINNYLAWYQQKPGKVPKLLIYAASTLQSGVPSRFSGSGSGTDFTLTISSLQPEDVATYYSLNYYSVPWTFGQGTKVEIK

SEQ ID NO: 1129 - protein, 245 aa, synthetic construct
DIQMTQSPSSLSASVGDRVTITCRASQGISNYLAWYQQKPGKVPNLLIYTASTLQSGVPSRFSGSGSGTDFTLTISSLQPEDVATYYCQKYNSAPFTFGPGTKVDIKGSTSGSGKPGSGEGSTKGQVQLLESGGGLVQPGGSLRLSCAASGFTFSSYAMNWVRQAPGKGLEWVSAISGGVGNTYYADSVKGRFTISRDNSKNTLYLQMNSLRAEDTAVYYCTKDGPLWGNYFDYWGRGTLVTVSS

SEQ ID NO: 1130 - protein, 245 aa, synthetic construct
QVQLLESGGGLVQPGGSLRLSCAASGFTFSSYAMNWVRQAPGKGLEWVSAISGGVGNTYYADSVKGRFTISRDNSKNTLYLQMNSLRAEDTAVYYCTKDGPLWGNYFDYWGRGTLVTVSSGSTSGSGKPGSGEGSTKGDIQMTQSPSSLSASVGDRVTITCRASQGISNYLAWYQQKPGKVPNLLIYTASTLQSGVPSRFSGSGSGTDFTLTISSLQPEDVATYYCQKYNSAPFTFGPGTKVDIK

SEQ ID NO: 1131 - protein, 246 aa, synthetic construct
DIQMTQSPSSLSASVGDRVTITCRASQSISSYLNWYQQKPGKAPKLLIYAASSLLTGVPSRFTGSGSGTDFTLTISSLQPEDFGTYYCQQSYSPPLTFGGGTKVEIKGSTSGSGKPGSGEGSTKGQVQLQESGPGLVKPSETLSLTCSVSGGSISSSSYYWGWIRQPPGKGLEWIGSIDYSGSTYYNPSLKSRVTISIDTSKNQFSLRLSSVTAAEKAVYYCARHGRGTIGYFDYWGQGTLVTVSS

SEQ ID NO: 1132 - protein, 245 aa, synthetic construct
DIQMTQSPSSLSASVGDRVTIACRASQVISNYLAWYQQKPGKVPKLLIYVASTLQSGVPSRFSGSGSGTDFTLTISSLQPEDVATYYCQNYNSAPWTFGQGTKLEIKGSTSGSGKPGSGEGSTKGQVQLLESGGGLVQPGGSLRLSCAASGFTFSSSAMAWVRQAPGKGLEWVSAISSSGDNTYYADSVKGRFTISRDTSKNTLSLQMSSLRAEDTAIYYCAKQGTNWGLYFDYWGQGTLVTVSS

SEQ ID NO: 1133 - protein, 245 aa, synthetic construct
QVQLLESGGGLVQPGGSLRLSCAASGFTFSSSAMAWVRQAPGKGLEWVSAISSSGDNTYYADSVKGRFTISRDTSKNTLSLQMSSLRAEDTAIYYCAKQGTNWGLYFDYWGQGTLVTVSSGSTSGSGKPGSGEGSTKGDIQMTQSPSSLSASVGDRVTIACRASQVISNYLAWYQQKPGKVPKLLIYVASTLQSGVPSRFSGSGSGTDFTLTISSLQPEDVATYYCQNYNSAPWTFGQGTKLEIK

SEQ ID NO: 1134 - protein, 248 aa, synthetic construct
EIVLTQSPSSLSASVGDRVTITCRASQSISSYLNWYQQKPGRAPELLIYAASSLQSGVPSRFSGSGSGTDFTLTISSLQPEDFATYYCQQSFSSLTFGQGTRLEIKGSTSGSGKPGSGEGSTKGQVQLQESGPELVKPSETLSITCTVSGGSISSRSYYWGWIRQPPGKGLEWIGSIYYGGSTYYNPSLKSRVTISADTSKNQFSLKLNSVTAADTAVFYCVRHPAGYSTRWSAFDIWGQGTMVTVSS

SEQ ID NO: 1135 - protein, 248 aa, synthetic construct
EIVLTQSPSSLSASVGDRVTITCRASQSISSYLNWYQLKPGKAPKLLIYAASSLHSGVPSRFSGSGSGTDFTLTISSLQPADFATYYCQQAYISLTFGQGTRLEIKGSTSGSGKPGSGEGSTKGQVQLQESGPGLVKPSETLSLTCTVSGGSISSRSYYWGWIRQPPGKGPEWIGSIYYSGSTFYNPSLKSRVTISEDTSKSQFSLKVTSVTAADTAVYYCARHPAGYSSSWSAFDIWGQGTMVTVSS

SEQ ID NO: 1136 - protein, 247 aa, synthetic construct
DIQMTQSPSSLSAFVGDRVTITCRASQDIGNYLAWYQQTPEKVPKLLIYAASTLQSGVPSRFSGSGSGTDFTLTISSLQPEDVATYYCQNYYSVPWTFGQGTKVEIKGSTSGSGKPGSGEGSTKGQVQLVESGGGLVQPGRSLRLSCSGSGFTSGDYAVSWVRQAPGKGLEWVGFIRTKPYGETTEYAASVKGRFTISRDDSKSIAYLQMNSLKAEDTAVFYCTFIPVSRFLEWLPWGQGIPVTVSS

SEQ ID NO: 1137 - protein, 245 aa, synthetic construct
DIQMTQSPSSLSASVGDRVTITCRASQGISNYLAWYQQRPGKVPKLLIYAASTLRSGVPSRFSGSGSGTDFTLTISSLQPEDVATYYCQKYNSAPLTFGGGTKVEIKGSTSGSGKPGSGEGSTKGQVQLLESGGGLVQPGASLRLSCAASGFTFSTYAMTWVRQAPGKGLEWVSGINGGGDTTYYADSVKGRFTISRDNSKNTLYLQMNSLRAEDTAVYYCAVRGYTYGYFFDYWGQGTLVTVSS

SEQ ID NO: 1138 - protein, 250 aa, synthetic construct
EIVLTQSPSSLSASVGDRLTITCRASQTISSYLNWYQQKPGKAPKVLIYAASSLQSGVPSRFSGSGSGTDFTLTISSLQPEDFATYYCQQSFIIPYTFGQGTKLEIKGSTSGSGKPGSGEGSTKGQVQLQESGPGLVKPSETLSLTCTVSGGSISSSSYYWGWIRQPPGKGLEWIGSLYYSGSTYYNPSLKSRVTISVDTSKNQFSLKLNSVTAADTAVYYCTRHPRGIAARWGNWFDPWGQGTLVTVSS

SEQ ID NO: 1139 - protein, 247 aa, synthetic construct
EIVLTQSPSSLSASVGDRVTITCRASQSISSYLNWYQQKPGKAPKLLIYAASSLQSGVPSRFSGSGSGTDFTLTISSLQPEDFATYYCQQSYSTPFTFGPGTKVDIKGSTSGSGKPGSGEGSTKGQVQLQESGPGLVKPSETLSLTCTVSGGSISSSSYYRGWIRQPPGKGLEWIGSIYYSGSTYYNPSLKSRVTISVDTSKNQFSLKLSSVTAADTAVYYCARHPRGSYGANFDYWGQGTLVTVSS

SEQ ID NO: 1140 - protein, 247 aa, synthetic construct
QVQLQESGPGLVKPSETLSLTCTVSGGSISSSSYYRGWIRQPPGKGLEWIGSIYYSGSTYYNPSLKSRVTISVDTSKNQFSLKLSSVTAADTAVYYCARHPRGSYGANFDYWGQGTLVTVSSGSTSGSGKPGSGEGSTKGEIVLTQSPSSLSASVGDRVTITCRASQSISSYLNWYQQKPGKAPKLLIYAASSLQSGVPSRFSGSGSGTDFTLTISSLQPEDFATYYCQQSYSTPFTFGPGTKVDIK

SEQ ID NO: 1141 - protein, 247 aa, synthetic construct
DIQMTQSPSSLSASVGDRVTVTCRANQDINNYLAWYQQTPGKVPKLLIYAASTLQSGVPSRFSGSGSGTDFTLTISSLQPEDVATYYCQNYYSVPWTFGQGTKLEIKGSTSGSGKPGSGEGSTKGQVQLVESGGGLVQPGRSLRLSCIGSGFTFGEYAMSWVRQAPGKGLEWVGFIRTKPYGGTTEFAASVKGRFTMSRDDSKSIAYLEMNSLKTEDTAVYYCTLIPALRFLEWLPWGQGTLVTVSS

SEQ ID NO: 1142 - protein, 246 aa, synthetic construct
EIVLTQSPDFQSVTPKESVTITCRASQSVGSGLHWYQQKPDQSPKLLIKYASQSFSGVPSRFSGSGSGTDFTLTINSLEAEDAATYYCLQSSSLPWTFGQGTKVEIKGSTSGSGKPGSGEGSTKGQVQLQESGPGLVKPSETLSLTCTVSGGSVSSGSYYWSWIRQPPGKGLEWIGYIFYSGSTYYNPSLKSRVTISVDTSKNQFSLKLTSVTAADTAVYFCARWMTTVKGYFDYWGQGTLVTVSS

SEQ ID NO: 1143 - protein, 248 aa, synthetic construct
DIQMTQSPSSLSASVGDRVTITCRASQSISSYLNWYQQKPGKAPKFLISPASSLQSGVPSRFSGSGSGTDFTLTISSLQPEDFATYYCQQSYSIPWTFGQGTKVEIKGSTSGSGKPGSGEGSTKGQVQLQESGPGLVKPSETLSLTCTVSGGSVSSASYYWSWIRQPPGKGLEYIGYIYYSGSTYYNPSLKSRVTISIDTSKNQFSLNLRSVTAADTAVYYCARYIVGRPGFNWFDPWGQGTLVTVSS

SEQ ID NO: 1144 - protein, 248 aa, synthetic construct
DIQMTQSPSSLSASVGDRVTITCRASQTISSYLNWYQQKPGKAPKLLISPASNLQSGVPSRFSGSGSGTDFTLTISSLQPEDFATYYCQQSYIIPWTFGQGTKVEIKGSTSGSGKPGSGEGSTKGQVQLQESGPGLVKPSETLSLTCTVSGDSVSSVSYYWSWIRQPPGKGLEWIGYIWYSGSTYYNPSLKSRVTISIDTSKNQFSLKLRSVTAADTAVYYCARYIVGRPGFNWFDPWGQGTLVTVSS

SEQ ID NO: 1145 - protein, 248 aa, synthetic construct
QVQLQESGPGLVKPSETLSLTCTVSGDSVSSVSYYWSWIRQPPGKGLEWIGYIWYSGSTYYNPSLKSRVTISIDTSKNQFSLKLRSVTAADTAVYYCARYIVGRPGFNWFDPWGQGTLVTVSSGSTSGSGKPGSGEGSTKGDIQMTQSPSSLSASVGDRVTITCRASQTISSYLNWYQQKPGKAPKLLISPASNLQSGVPSRFSGSGSGTDFTLTISSLQPEDFATYYCQQSYIIPWTFGQGTKVEIK

SEQ ID NO: 1146-1148 - skipped (3 entries)

SEQ ID NO: 1149 - protein, 28 aa, Homo sapiens
INVTVPSTANCTSPSLCWTDGIQNWTMK

SEQ ID NO: 1150 - protein, 29 aa, Homo sapiens
INVTVPSTANCTSPSLCWTDGIQNWTMKC

SEQ ID NO: 1151 - protein, 3414 aa, Megathura crenulata
MLSVRLLIVVLALANAENLVRKSVEHLTQEETLDLQAALRELQMDSSSIGFQKIAAAHGAPASCVHKDTSIACCIHGMPTFPHWHRAYVVHMERALQTKRRTSGLPYWDWTEPITQLPSLAADPVYIDSQGGKAHTNYWYRGNIDFLDKKTNRAVDDRLFEKVKPGQHTHLMESVLDALEQDEFCKFEIQFELAHNAIHYLVGGKHDYSMANLEYTAYDPIFFLHHSNVDRIFAIWQRLQELRNKDPKAMDCAQELLHQKMEPFSWEDNDIPLTNEHSTPADLFDYCELHYDYDTLNLNGMTPEELKTYLDERSSRARAFASFRLKGFGGSANVFVYVCIPDDNDRNDDHCEKAGDFFVLGGPSEMKWQFYRPYLFDLSDTVHKMGMKLDGHYTVKAELFSVNGTALPDDLLPHPVVVHHPEKGFTDPPVKHHQSANLLVRKNINDLTREEVLNLREAFHKFQEDRSVDGYQATAEYHGLPARCPRPDAKDRYACCVHGMPIFPHWHRLFVTQVEDALVGRGATIGIPYWDWTEPMTHIPGLAGNKTYVDSHGASHTNPFHSSVIAFEENAPHTKRQIDQRLFKPATFGHHTDLFNQILYAFEQEDYCDFEVQFEITHNTIHAWTGGSEHFSMSSLHYTAFDPLFYFHHSNVDRLWAVWQALQMRRHKPYRAHCAISLEHMHLKPFAFSSPLNNNEKTHANAMPNKIYDYENVLHYTYEDLTFGGISLENIEKMIHENQQEDRIYAGFLLAGIRTSANVDIFIKTTDSVQHKAGTFAVLGGSKEMKWGFDRVFKFDITHVLKDLDLTADGDFEVTVDITEVDGTKLASSLIPHASVIREHARVKFDKVPRSRLIRKNVDRLSPEEMNELRKALALLKEDKSAGGFQQLGAFHGEPKWCPSPEASKKFACCVHGMSVFPHWHRLLTVQSENALRRHGYDGALPYWDWTSPLNHLPELADHEKYVDPEDGVEKHNPWFDGHIDTVDKTTTRSVQNKLFEQPEFGHYTSIAKQVLLALEQDNFCDFEIQYEIAHNYIHALVGGAQPYGMASLRYTAFDPLFYLHHSNTDRIWAIWQALQKYRGKPYNVANCAVTSMREPLQPFGLSANINTDHVTKEHSVPFNVFDYKTNFNYEYDTLEFNGLSISQLNKKLEAIKSQDRFFAGFLLSGFKKSSLVKFNICTDSSNCHPAGEFYLLGDENEMPWAYDRVFKYDITEKLHDLKLHAEDHFYIDYEVFDLKPASLGKDLFKQPSVIHEPRIGHHEGEVYQAEVTSANRIRKNIENLSLGELESLRAAFLEIENDGTYESIAKFHGSPGLCQLNGNPISCCVHGMPTFPHWHRLYVVVVENALLKKGSSVAVPYWDWTKRIEHLPHLISDATYYNSRQHHYETNPFHHGKITHENEITTRDPKDSLFHSDYFYEQVLYALEQDNFCDFEIQLEILHNALHSLLGGKGKYSMSNLDYAAFDPVFFLHHATTDRIWAIWQDLQRFRKRPYREANCAIQLMHTPLQPFDKSDNNDEATKTHATPHDGFEYQNSFGYAYDNLELNHYSIPQLDHMLQERKRHDRVFAGFLLHNIGTSADGHVFVCLPTGEHTKDCSHEAGMFSILGGQTEMSFVFDRLYKLDITKALKKNGVHLQGDFDLEIEITAVNGSHLDSHVIHSPTILFEAGTDSAHTDDGHTEPVMIRKDITQLDKRQQLSLVKALESMKADHSSDGFQAIASFHALPPLCPSPAASKRFACCVHGMATFPQWHRLYTVQFQDSLRKHGAVVGLPYWDWTLPRSELPELLTVSTIHDPETGRDIPNPFIGSKIEFEGENVHTKRDINRDRLFQGSTKTHHNWFIEQALLALEQTNYCDFEVQFEIMHNGVHTWVGGKEPYGIGHLHYASYDPLFYIHHSQTDRIWAIWQSLQRFRGLSGSEANCAVNLMKTPLKPFSFGAPYNLNDHTHDFSKPEDTFDYQKFGYIYDTLEFAGWSIRGIDHIVRNRQEHSRVFAGFLLEGFGTSATVDFQVCRTAGDCEDAGYFTVLGGEKEMPWAFDRLYKYDITETLDKMNLRHDEIFQIEVTITSYDGTVLDSGLIPTPSIIYDPAHHDISSHHLSLNKVRHDLSTLSERDIGSLKYALSSLQADTSADGFAAIASFHGLPAKCNDSHNNEVACCIHGMPTFPHWHRLYTLQFEQALRRHGSSVAVPYWDWTKPIHNIPHLFTDKEYYDVWRNKVMPNPFARGYVPSHDTYTVRDVQEGLFHLTSTGEHSALLNQALLALEQHDYCDFAVQFEVMHNTIHYLVGGPQVYSLSSLHYASYDPIFFIHHSFVDKVWAVWQALQEKRGLPSDRADCAVSLMTQNMRPFHYEINHNQFTKKHAVPNDVFKYELLGYRYDNLEIGGMNLHEIEKEIKDKQHHVRVFAGFLLHGIRTSADVQFQICKTSEDCHHGGQIFVLGGTKEMAWAYNRLFKYDITHALHDAHITPEDVFHPSEPFFIKVSVTAVNGTVLPASILHAPTIIYEPGLDHHEDHHSSSMAGHGVRKEINTLTTAEVDNLKDAMRAVMADHGPNGYQAIAAFHGNPPMCPMPDGKNYSCCTHGMATFPHWHRLYTKQMEDALTAHGARVGLPYWDGTTAFTALPTFVTDEEDNPFHHGHIDYLGVDTTRSPRDKLFNDPERGSESFFYRQVLLALEQTDFCQFEVQFEITHNAIHSWTGGLTPYGMSTLEYTTYDPLFWLHHANTDRIWAIWQALQEYRGLPYDHANCEIQAMKRPLRPFSDPINHNAFTHSNAKPTDVFEYSRFNFQYDNLRFHGMTIKKLEHELEKQKEEDRTFAAFLLHGIKKSADVSFDVCNHDGECHFAGTFAILGGEHEMPWSFDRLFRYDITQVLKQMHLEYDSDFTFHMRIIDTSGKQLPSDLIKMPTVEHSPGGKHHEKHHEDHHEDILVRKNIHSLSHHEAEELRDALYKLQNDESHGGYEHIAGFHGYPNLCPEKGDEKYPCCVHGMSIFPHWHRLHTIQFERALKKHGSHLGIPYWDWTQTISSLPTFFADSGNNNPFFKYHIRSINQDTVRDVNEAIFQQTKFGEFSSIFYLALQALEEDNYCDFEVQYEILHNEVHALIGGAEKYSMSTLEYSAFDPYFMIHHASLDKIWIIWQELQKRRVKPAHAGSCAGDIMHVPLHPFNYESVNNDDFTRENSLPNAVVDSHRFNYKYDNLNLHGHNIEELEEVLRSLRLKSRVFAGFVLSGIRTTAVVKVYIKSGTDSDDEYAGSFVILGGAKEMPWAYERLYRFDITETVHNLNLTDDHVKFRFDLKKYDHTELDASVLPAPIIVRRPNNAVFDIIEIPIGKDVNLPPKVVVKRGTKIMFMSVDEAVTTPMLNLGSYTAMFKCKVPPFSFHAFELGKMYSVESGDYFMTASTTELCNDNNLRIHVHVDDE

SEQ ID NO: 1152 - protein, 367 aa, synthetic construct
VEVATHYLEIITQLIVESFHFKNGEDAPDLLKVITKPFTKLIVQLDKKVISQIAMNDEKAKNKSLVKIWCKTFTNKTQINVTVPSTANCTSPSLCWTDGIQNWTMKNVTYKENIAKCQHIFVNFHLPDLGSAAAEPRSPTIKPCPPCKCPAPNLEGGPSVFIFPPKIKDVLMISLSPIVTCVVVDVSEDDPDVQISWFVNNVEVHTAQTQTHREDYNSTLRVVSALPIQHQDWMSGKAFACAVNNKDLPAPIERTISKPKGSVRAPQVYVLPPPEEEMTKKQVTLTCMVTDFMPEDIYVEWTNNGKTELNYKNTEPVLDSDGSYFMYSKLRVEKKNWVERNSYSCSVVHEGLHNHHTTKSFSRTPGK

SEQ ID NO: 1153 - protein, 233 aa, Mus sp.
EPRSPTIKPCPPCKCPAPNLEGGPSVFIFPPKIKDVLMISLSPIVTCVVVDVSEDDPDVQISWFVNNVEVHTAQTQTHREDYNSTLRVVSALPIQHQDWMSGKAFACAVNNKDLPAPIERTISKPKGSVRAPQVYVLPPPEEEMTKKQVTLTCMVTDFMPEDIYVEWTNNGKTELNYKNTEPVLDSDGSYFMYSKLRVEKKNWVERNSYSCSVVHEGLHNHHTTKSFSRTPGK

SEQ ID NO: 1154 - protein, 107 aa, synthetic construct
DIQMTQSPSSLSASVGDRVTITCRASQSISSYLNWYQQKPGKAPKLLIYAASSLLTGVPSRFTGSGSGTDFTLTISSLQPEDFGTYYCQQSYSPPLTFGGGTKVEIK

SEQ ID NO: 1155 - protein, 107 aa, synthetic construct
DIQMTQSPSSLSASVGDRVTIACRASQVISNYLAWYQQKPGKVPKLLIYVASTLQSGVPSRFSGSGSGTDFTLTISSLQPEDVATYYCQNYNSAPWTFGQGTKLEIK

SEQ ID NO: 1156 - protein, 107 aa, synthetic construct
DIQMTQSPSSLSAFVGDRVTITCRASQDIGNYLAWYQQTPEKVPKLLIYAASTLQSGVPSRFSGSGSGTDFTLTISSLQPEDVATYYCQNYYSVPWTFGQGTKVEIK

SEQ ID NO: 1157 - DNA, 2451 bp, synthetic construct
  source 1..2451: mol_type = other DNA
gaaatcgtcctgacacagtctccagattttcagagcgtgacgccaaaggagaaagtgacaattacatgccgggcatctcagtctgttgggtctgggttgcattggtatcagcaaaagcccgaccagtcacccaaactgctcatcaaatatgcaagccagagtttttcaggcgtaccttcacgatttagcggaagtggttctggcactgacttcaccttgacgattaatagcctggaagtagaagacgctgccactttctactgcctgcaaagtagctccctgccctggacttttgggcagggtactaaggtcgagatcaagggctcgacaagcggaagtggcaaaccgggcagcggcgagggaagcaccaagggacaagtgcaactgcaagagtctggacccgggctggtgaaaccaagcgagacattatccctcacttgtaccgtgtcaggcggtagtgtgtcctccgggaatttctactggagttggatacgccagcctcctgggaagggccttgaatggattggctacatctactattcaggctccacctactacaacccgtctttgaagtcaagggttacgataagcgtcgatacctccaaaaaccaattctccctaaagctcagatcgttaactgccgctgataccgcggtgtactattgtgcccgttggatgaccaaagttaagggttatttcgactattggggacaagggacacttgtcaccgtgtcctccgcaaccacgacgccagcgccgcgaccaccaacaccggcgcccaccatcgcgtcgcagcccctgtccctgcgccctgaggcgtgcttcatgtacgtggcggcggccgcctttgtgcttctgttcttcgtgggctgcggggtgctgctgtcccgtaaacgcagacgtcaacacggtcaactgtggtttccagaaggttttaaggtctccgaagcaagtaagaagaaaagacgtgaaccactgggagaagatagcgtcggtctgaaaccactcaagaatgccatggtttctaaactgagccagctgcagacggagctcctggcggccctgctggagtcagggctgagcaaagaggcactgctccaggcactgggcgagccggggccctacctcctggctggagaaggccccctggacaagggggagtcctgcggcggcggtcgaggggagctggctgagctgcccaatgggctgggggagactcggggctccgaggacgagaccgacgacgatggggaagacttcacgccacccatcctcaaagagctggagaacctcagccctgaggaggcggcccaccagaaagccgtggtggagacccttctgcaggaggacccgtggcgtgtggcgaagatggtcaagtcctacctgcagcagcacaacatcccacagcgggaggtggtcgataccactggcctcaaccagtcccacctgtcccaacacctcaacaagggcactcccatgaagacgcagaagcgggccgccctgtacacctggtatgtccgcaagcagcgagaggtggcgcagcagttcacccatgcagggcagggagggctgattgaagagcccacaggagatgagctaccaaccaagaaggggcggaggaaccgtttcaagtggggcccagcatcccagcagatcctgttccaggcctatgagaggcagaagaaccctagcaaggaggagcgagaaacgctagtggaggagtgcaatagggcggaatgcatccagagaggtgtgtcaccatcacaagcacaaggtctgggctccaacctcgtcacggaggtgcgtgtctacaactggtttgccaaccggcgcaaagaagaagccttccggcacaagctggccatgacctgcagggatgagtttcccaccatggtgtttccttctgggcagatcagccaggcctcggccttggccccggcccctccccaagtcctgccccaggctccagcccctgcccctgctccagccatggtatcagctctggcccaggccccagcccctgtcccagtcctagccccaggccctcctcaagctgtggccccacctgcccccaagcccacccaagctggggaaggaacgctgtcagaggccctgctgcagctgcagtttgatgatgaagacctgggggccttgcttggcaacagcacagacccagctgtgttcacagacctggcatccgtcgacaactccgagtttcagcagctgctgaaccagggcatacctgtggccccccacacaactgagcccatgctgatggagtaccctgaggctataactcgcctagtgacaggggcccagaggccccccgacccagctcctgctccactgggggccccggggctccccaatggcctcctttcaggagatgaagacttctcctccattgcggacatggacttctcagccctgctgagtcagatcagctcctaa

SEQ ID NO: 1158 - protein, 816 aa, synthetic construct
EIVLTQSPDFQSVTPKEKVTITCRASQSVGSGLHWYQQKPDQSPKLLIKYASQSFSGVPSRFSGSGSGTDFTLTINSLEVEDAATFYCLQSSSLPWTFGQGTKVEIKGSTSGSGKPGSGEGSTKGQVQLQESGPGLVKPSETLSLTCTVSGGSVSSGNFYWSWIRQPPGKGLEWIGYIYYSGSTYYNPSLKSRVTISVDTSKNQFSLKLRSLTAADTAVYYCARWMTKVKGYFDYWGQGTLVTVSSATTTPAPRPPTPAPTIASQPLSLRPEACFMYVAAAAFVLLFFVGCGVLLSRKRRRQHGQLWFPEGFKVSEASKKKRREPLGEDSVGLKPLKNAMVSKLSQLQTELLAALLESGLSKEALLQALGEPGPYLLAGEGPLDKGESCGGGRGELAELPNGLGETRGSEDETDDDGEDFTPPILKELENLSPEEAAHQKAVVETLLQEDPWRVAKMVKSYLQQHNIPQREVVDTTGLNQSHLSQHLNKGTPMKTQKRAALYTWYVRKQREVAQQFTHAGQGGLIEEPTGDELPTKKGRRNRFKWGPASQQILFQAYERQKNPSKEERETLVEECNRAECIQRGVSPSQAQGLGSNLVTEVRVYNWFANRRKEEAFRHKLAMTCRDEFPTMVFPSGQISQASALAPAPPQVLPQAPAPAPAPAMVSALAQAPAPVPVLAPGPPQAVAPPAPKPTQAGEGTLSEALLQLQFDDEDLGALLGNSTDPAVFTDLASVDNSEFQQLLNQGIPVAPHTTEPMLMEYPEAITRLVTGAQRPPDPAPAPLGAPGLPNGLLSGDEDFSSIADMDFSALLSQISS

SEQ ID NO: 1159 - DNA, 2451 bp, synthetic construct
  source 1..2451: mol_type = other DNA
gagatagtcctgacccagtcacccgatttccagagtgttactcctaaggagaaagtgactataacatgccgggcatctcagtctgtcggaagcgggctacattggtaccagcagaagcctgaccagagcccgaaactgctcatcaaatatgcctcccagtcgttttctggcgtgccctctcgcttttccggaagcggatctggcacagacttcaccttgaccatcaatagcctggaaactgaggacgccgctacgtatttctgccagcagtcctccagtctgccttggacatttggtcagggaacgaaggtggagatcaagggttcaacatcagggagcgggaaaccgggctctggcgagggctcaacaaagggacaagtgcaactgcaagaatcgggacccgggctggttaaaccaagtgaaaccctttccctcacttgtaccgtaagcggcggtagcgtgtcctctggtagctactattggagttggattaggcaggcgccagggaaaggcctcgaatggattgggtatatctactacagcggcagtaactactacaacccatcattgaagtctagagtgacaattagtgtcgatacctctaaaaatcaattctcacttaagctgcgagctgtaaccgccgcagacactgcggtgtactattgtgcccgttggatgaccactatcaagggctacttcgattattggggacaagggacattagttacggtgtcctccgcaaccacgacgccagcgccgcgaccaccaacaccggcgcccaccatcgcgtcgcagcccctgtccctgcgccctgaggcgtgcttcatgtacgtggcggcggccgcctttgtgcttctgttcttcgtgggctgcggggtgctgctgtcccgtaaacgcagacgtcaacacggtcaactgtggtttccagaaggttttaaggtctccgaagcaagtaagaagaaaagacgtgaaccactgggagaagatagcgtcggtctgaaaccactcaagaatgccatggtttctaaactgagccagctgcagacggagctcctggcggccctgctggagtcagggctgagcaaagaggcactgctccaggcactgggcgagccggggccctacctcctggctggagaaggccccctggacaagggggagtcctgcggcggcggtcgaggggagctggctgagctgcccaatgggctgggggagactcggggctccgaggacgagaccgacgacgatggggaagacttcacgccacccatcctcaaagagctggagaacctcagccctgaggaggcggcccaccagaaagccgtggtggagacccttctgcaggaggacccgtggcgtgtggcgaagatggtcaagtcctacctgcagcagcacaacatcccacagcgggaggtggtcgataccactggcctcaaccagtcccacctgtcccaacacctcaacaagggcactcccatgaagacgcagaagcgggccgccctgtacacctggtatgtccgcaagcagcgagaggtggcgcagcagttcacccatgcagggcagggagggctgattgaagagcccacaggagatgagctaccaaccaagaaggggcggaggaaccgtttcaagtggggcccagcatcccagcagatcctgttccaggcctatgagaggcagaagaaccctagcaaggaggagcgagaaacgctagtggaggagtgcaatagggcggaatgcatccagagaggtgtgtcaccatcacaagcacaaggtctgggctccaacctcgtcacggaggtgcgtgtctacaactggtttgccaaccggcgcaaagaagaagccttccggcacaagctggccatgacctgcagggatgagtttcccaccatggtgtttccttctgggcagatcagccaggcctcggccttggccccggcccctccccaagtcctgccccaggctccagcccctgcccctgctccagccatggtatcagctctggcccaggccccagcccctgtcccagtcctagccccaggccctcctcaagctgtggccccacctgcccccaagcccacccaagctggggaaggaacgctgtcagaggccctgctgcagctgcagtttgatgatgaagacctgggggccttgcttggcaacagcacagacccagctgtgttcacagacctggcatccgtcgacaactccgagtttcagcagctgctgaaccagggcatacctgtggccccccacacaactgagcccatgctgatggagtaccctgaggctataactcgcctagtgacaggggcccagaggccccccgacccagctcctgctccactgggggccccggggctccccaatggcctcctttcaggagatgaagacttctcctccattgcggacatggacttctcagccctgctgagtcagatcagctcctaa

SEQ ID NO: 1160 - protein, 816 aa, synthetic construct
EIVLTQSPDFQSVTPKEKVTITCRASQSVGSGLHWYQQKPDQSPKLLIKYASQSFSGVPSRFSGSGSGTDFTLTINSLETEDAATYFCQQSSSLPWTFGQGTKVEIKGSTSGSGKPGSGEGSTKGQVQLQESGPGLVKPSETLSLTCTVSGGSVSSGSYYWSWIRQAPGKGLEWIGYIYYSGSNYYNPSLKSRVTISVDTSKNQFSLKLRAVTAADTAVYYCARWMTTIKGYFDYWGQGTLVTVSSATTTPAPRPPTPAPTIASQPLSLRPEACFMYVAAAAFVLLFFVGCGVLLSRKRRRQHGQLWFPEGFKVSEASKKKRREPLGEDSVGLKPLKNAMVSKLSQLQTELLAALLESGLSKEALLQALGEPGPYLLAGEGPLDKGESCGGGRGELAELPNGLGETRGSEDETDDDGEDFTPPILKELENLSPEEAAHQKAVVETLLQEDPWRVAKMVKSYLQQHNIPQREVVDTTGLNQSHLSQHLNKGTPMKTQKRAALYTWYVRKQREVAQQFTHAGQGGLIEEPTGDELPTKKGRRNRFKWGPASQQILFQAYERQKNPSKEERETLVEECNRAECIQRGVSPSQAQGLGSNLVTEVRVYNWFANRRKEEAFRHKLAMTCRDEFPTMVFPSGQISQASALAPAPPQVLPQAPAPAPAPAMVSALAQAPAPVPVLAPGPPQAVAPPAPKPTQAGEGTLSEALLQLQFDDEDLGALLGNSTDPAVFTDLASVDNSEFQQLLNQGIPVAPHTTEPMLMEYPEAITRLVTGAQRPPDPAPAPLGAPGLPNGLLSGDEDFSSIADMDFSALLSQISS

SEQ ID NO: 1161 - DNA, 2454 bp, synthetic construct
  source 1..2454: mol_type = other DNA
gatattcagatgacacagagcccaagttcactgtcagcgagtgtcggagatcgggttactataacctgccgagcatctcaggatatcaataattacctggcctggtatcagcaaaaacccggcaaagtcccgaagctcctgatatacgcagcttcaacactgcaaagcggtgtgccctcgcgctttagcggctctggcagcgggacagatttcaccctgacgatttcctcccttcaacccgaggacgtggccacttactactccctcaactattactctgtaccctggacctttggccaagggacaaaggtggaaatcaagggctctactagcggttcagggaaacctgggagtggagagggctcgaccaagggacaggtccagctcgtggagtctggcggtgggctggttcagccagggaggagtttgcggctttcctgtacgggaagcggattcacctttggtgactatgccatgaactgggtcaggcaggctcctggaaaaggcctagagtgggtgggtttcatcagaaccaagccatatggcggcactacagaatatgcagccagcgtaaaagggagattcacgttcagccgcgacgactctaagtcaatagcttaccttcagatgaactccctcaagaccgaagacaccgccgtgtactattgtactatgatccctgtgctgcgttttttagagtggttgccttggggacaagggacattagttactgtgtcctccgcaaccacgacgccagcgccgcgaccaccaacaccggcgcccaccatcgcgtcgcagcccctgtccctgcgccctgaggcgtgcttcatgtacgtggcggcggccgcctttgtgcttctgttcttcgtgggctgcggggtgctgctgtcccgtaaacgcagacgtcaacacggtcaactgtggtttccagaaggttttaaggtctccgaagcaagtaagaagaaaagacgtgaaccactgggagaagatagcgtcggtctgaaaccactcaagaatgccatggtttctaaactgagccagctgcagacggagctcctggcggccctgctggagtcagggctgagcaaagaggcactgctccaggcactgggcgagccggggccctacctcctggctggagaaggccccctggacaagggggagtcctgcggcggcggtcgaggggagctggctgagctgcccaatgggctgggggagactcggggctccgaggacgagaccgacgacgatggggaagacttcacgccacccatcctcaaagagctggagaacctcagccctgaggaggcggcccaccagaaagccgtggtggagacccttctgcaggaggacccgtggcgtgtggcgaagatggtcaagtcctacctgcagcagcacaacatcccacagcgggaggtggtcgataccactggcctcaaccagtcccacctgtcccaacacctcaacaagggcactcccatgaagacgcagaagcgggccgccctgtacacctggtatgtccgcaagcagcgagaggtggcgcagcagttcacccatgcagggcagggagggctgattgaagagcccacaggagatgagctaccaaccaagaaggggcggaggaaccgtttcaagtggggcccagcatcccagcagatcctgttccaggcctatgagaggcagaagaaccctagcaaggaggagcgagaaacgctagtggaggagtgcaatagggcggaatgcatccagagaggtgtgtcaccatcacaagcacaaggtctgggctccaacctcgtcacggaggtgcgtgtctacaactggtttgccaaccggcgcaaagaagaagccttccggcacaagctggccatgacctgcagggatgagtttcccaccatggtgtttccttctgggcagatcagccaggcctcggccttggccccggcccctccccaagtcctgccccaggctccagcccctgcccctgctccagccatggtatcagctctggcccaggccccagcccctgtcccagtcctagccccaggccctcctcaagctgtggccccacctgcccccaagcccacccaagctggggaaggaacgctgtcagaggccctgctgcagctgcagtttgatgatgaagacctgggggccttgcttggcaacagcacagacccagctgtgttcacagacctggcatccgtcgacaactccgagtttcagcagctgctgaaccagggcatacctgtggccccccacacaactgagcccatgctgatggagtaccctgaggctataactcgcctagtgacaggggcccagaggccccccgacccagctcctgctccactgggggccccggggctccccaatggcctcctttcaggagatgaagacttctcctccattgcggacatggacttctcagccctgctgagtcagatcagctcctaa

SEQ ID NO: 1162 - protein, 817 aa, synthetic construct
DIQMTQSPSSLSASVGDRVTITCRASQDINNYLAWYQQKPGKVPKLLIYAASTLQSGVPSRFSGSGSGTDFTLTISSLQPEDVATYYSLNYYSVPWTFGQGTKVEIKGSTSGSGKPGSGEGSTKGQVQLVESGGGLVQPGRSLRLSCTGSGFTFGDYAMNWVRQAPGKGLEWVGFIRTKPYGGTTEYAASVKGRFTFSRDDSKSIAYLQMNSLKTEDTAVYYCTMIPVLRFLEWLPWGQGTLVTVSSATTTPAPRPPTPAPTIASQPLSLRPEACFMYVAAAAFVLLFFVGCGVLLSRKRRRQHGQLWFPEGFKVSEASKKKRREPLGEDSVGLKPLKNAMVSKLSQLQTELLAALLESGLSKEALLQALGEPGPYLLAGEGPLDKGESCGGGRGELAELPNGLGETRGSEDETDDDGEDFTPPILKELENLSPEEAAHQKAVVETLLQEDPWRVAKMVKSYLQQHNIPQREVVDTTGLNQSHLSQHLNKGTPMKTQKRAALYTWYVRKQREVAQQFTHAGQGGLIEEPTGDELPTKKGRRNRFKWGPASQQILFQAYERQKNPSKEERETLVEECNRAECIQRGVSPSQAQGLGSNLVTEVRVYNWFANRRKEEAFRHKLAMTCRDEFPTMVFPSGQISQASALAPAPPQVLPQAPAPAPAPAMVSALAQAPAPVPVLAPGPPQAVAPPAPKPTQAGEGTLSEALLQLQFDDEDLGALLGNSTDPAVFTDLASVDNSEFQQLLNQGIPVAPHTTEPMLMEYPEAITRLVTGAQRPPDPAPAPLGAPGLPNGLLSGDEDFSSIADMDFSALLSQISS

SEQ ID NO: 1163 - DNA, 1425 bp, synthetic construct
  source 1..1425: mol_type = other DNA
caagtgcagctggtccagtctggggcggaagtgaaaaagcccggagctagtgtaaaggtgtcctgtaaagccagcggctacaccttcaccggttattacctgcattgggtccggcaggctcctggccagggcctggagtggatgggctggatttccgcatataacggaaacacaaattacgcccagaacctgcaaggccgcgtgaccatgaccagggacacaagcactagcactgtctacatggagttgtctagcttgagaagcgaagataccgctgtgtactattgcgcccgacactcttactcgggctcatactcaacgctaccctattatgggatggatgtttggggtcaagggacaacggtcacagtatcctctggaggcggtggcagcggaggaggcgggtctggaggtggtggatcagacattcagatgacccagtcaccaagttccttatccgcaagcgttggggatcgtgttacaattacttgcagggcctcgcaagggatctctaattatctcgcttggtaccagcagaaacctgggaaagcacccaagctgctgatctacactgcaagcacactttttccaggagtgccgtcaagattctctgggtccgggagtggcactgacttcacccttaccatctcctccctccagcctgaggactttgccacatattattgtcaacagagttactccataccactcacgtttggcggcggaacaaaagttgaaatcaaggcggcagcaaccacgacgccagcgccgcgaccaccaacaccggcgcccaccatcgcgtcgcagccactgtcactgcgcccagaagcgtgccggccagcggcggggggcgcagtgcatacgagggggctggacttcgcctgtgatatctacatctgggcgcccttggccgggacttgtggggtccttctcctgtcactggttatcaccctttactgcaaacggggcagaaagaaactcctgtatatattcaaacaaccatttatgagaccagtacaaactactcaagaagaggacggctgtagctgccgatttccagaagaagaagaaggaggatgtgaactgagagtgaagttcagcaggagcgcagacgcccccgcgtaccagcagggccagaaccagctctataacgagctcaatctaggacgaagagaggagtacgatgttttggacaagaggcgtggccgggaccctgagatggggggaaagccgagaaggaagaaccctcaggaaggcctgtacaatgaactgcagaaagataagatggcggaggcctacagtgagattgggatgaaaggcgagcgccggaggggcaaggggcacgatggcctttaccagggtctcagtacagccaccaaggacacctacgacgcccttcacatgcaggccctgccccctaggtaa

SEQ ID NO: 1164 - protein, 474 aa, synthetic construct
QVQLVQSGAEVKKPGASVKVSCKASGYTFTGYYLHWVRQAPGQGLEWMGWISAYNGNTNYAQNLQGRVTMTRDTSTSTVYMELSSLRSEDTAVYYCARHSYSGSYSTLPYYGMDVWGQGTTVTVSSGGGGSGGGGSGGGGSDIQMTQSPSSLSASVGDRVTITCRASQGISNYLAWYQQKPGKAPKLLIYTASTLFPGVPSRFSGSGSGTDFTLTISSLQPEDFATYYCQQSYSIPLTFGGGTKVEIKAAATTTPAPRPPTPAPTIASQPLSLRPEACRPAAGGAVHTRGLDFACDIYIWAPLAGTCGVLLLSLVITLYCKRGRKKLLYIFKQPFMRPVQTTQEEDGCSCRFPEEEEGGCELRVKFSRSADAPAYQQGQNQLYNELNLGRREEYDVLDKRRGRDPEMGGKPRRKNPQEGLYNELQKDKMAEAYSEIGMKGERRRGKGHDGLYQGLSTATKDTYDALHMQALPPR

SEQ ID NO: 1165 - DNA, 1410 bp, synthetic construct
  source 1..1410: mol_type = other DNA
caggtccagttggtacagagcggcgccgaagtgaaaaagcctggggcgtccgtcaaagtgtcttgcaaggcctccggctatacattcaccgggtactacatgcattgggtgcggcaggcacctggccagggtctagaatggatgggccggatcaatcccaactccggcggcacaaactatgctcagaaatttcaaggtcgcgtcaccatgacccgtgacacaagtacgagcaccgtctacatggagctgtcctccctcaggagcgaggatacagccgtgtactattgtgcaagggagcgcgccggctatagcagcgggcagttcgattattggggacaagggactctggtaactgtgtcctccggaggcggaggatcaggcggaggaggctcaggaggtggaggttctgacattcagatgactcaatctccctcgtcactgtcagctagtgttggggatagagtgactattacctgccgagccagtcagtcaatatctaactggctcgcatggtaccagcagaagccagggaaggctcccaaactgctgatctacgccgcgagcacccttcagaatggcgtgccgtctagatttagcggttctgggtctgggaccgactttacacttactatcagtagtttacaaccagaggactttgctacttattactgtcaacagagctacaccttccctattacgttcggccagggaacaaaagttgaaatcaaggcggcagcaaccacgacgccagcgccgcgaccaccaacaccggcgcccaccatcgcgtcgcagccactgtcactgcgcccagaagcgtgccggccagcggcggggggcgcagtgcatacgagggggctggacttcgcctgtgatatctacatctgggcgcccttggccgggacttgtggggtccttctcctgtcactggttatcaccctttactgcaaacggggcagaaagaaactcctgtatatattcaaacaaccatttatgagaccagtacaaactactcaagaagaggacggctgtagctgccgatttccagaagaagaagaaggaggatgtgaactgagagtgaagttcagcaggagcgcagacgcccccgcgtaccagcagggccagaaccagctctataacgagctcaatctaggacgaagagaggagtacgatgttttggacaagaggcgtggccgggaccctgagatggggggaaagccgagaaggaagaaccctcaggaaggcctgtacaatgaactgcagaaagataagatggcggaggcctacagtgagattgggatgaaaggcgagcgccggaggggcaaggggcacgatggcctttaccagggtctcagtacagccaccaaggacacctacgacgcccttcacatgcaggccctgccccctaggtaa

SEQ ID NO: 1166 - protein, 469 aa, synthetic construct
QVQLVQSGAEVKKPGASVKVSCKASGYTFTGYYMHWVRQAPGQGLEWMGRINPNSGGTNYAQKFQGRVTMTRDTSTSTVYMELSSLRSEDTAVYYCARERAGYSSGQFDYWGQGTLVTVSSGGGGSGGGGSGGGGSDIQMTQSPSSLSASVGDRVTITCRASQSISNWLAWYQQKPGKAPKLLIYAASTLQNGVPSRFSGSGSGTDFTLTISSLQPEDFATYYCQQSYTFPITFGQGTKVEIKAAATTTPAPRPPTPAPTIASQPLSLRPEACRPAAGGAVHTRGLDFACDIYIWAPLAGTCGVLLLSLVITLYCKRGRKKLLYIFKQPFMRPVQTTQEEDGCSCRFPEEEEGGCELRVKFSRSADAPAYQQGQNQLYNELNLGRREEYDVLDKRRGRDPEMGGKPRRKNPQEGLYNELQKDKMAEAYSEIGMKGERRRGKGHDGLYQGLSTATKDTYDALHMQALPPR

SEQ ID NO: 1167-1177 - skipped (11 entries)

SEQ ID NO: 1178 - DNA, 360 bp, synthetic construct
  source 1..360: mol_type = other DNA
caagtgcagctgctggaatctggcggcgggctggtgcaacctggagggagcttgcggttatcatgcgccgcctctggcttcaccttctcctcctatgccatgaattgggttaggcaggctcctgggaaaggtctggagtgggtaagcgctattagtggtggagtgggaaacacatattatgccgattctgtgaagggacgctttacaatctcgagagacaacagcaaaaatactctgtaccttcaaatgaactccctccgagccgaggataccgcagtgtactattgcacaaaggacgggccactttggggcaactattttgattactggggcagaggaacattggtaaccgtgtcctcc

SEQ ID NO: 1179 - DNA, 321 bp, synthetic construct
  source 1..321: mol_type = other DNA
gacattcagatgactcagtcacctagctcactgtcagcgtcagtcggagatcgggttactattacgtgtagggctagtcagggtatcagcaattacctcgcctggtaccagcagaaacccggcaaagtcccaaacctgctcatctacactgcaagcaccctacagagcggtgttccatcccgtttttctggatcgggatctgggacggatttcaccctcaccatatcctccttacaacccgaggacgtcgcaacttattactgtcagaagtacaatagtgctcccttcacgtttggcccgggcacaaaggtggacatcaag

SEQ ID NO: 1180 - DNA, 363 bp, synthetic construct
  source 1..363: mol_type = other DNA
caggtccaactacaggagtcgggccctgggctggtgaagccatctgaaaccctgtcactcacttgctctgttagtggtggttcaatctcctccagctcatattactggggctggattagacagccacccggaaaagggttagagtggataggcagtatcgactacagcggtagcacctattacaacccaagcctcaagtcccgagtcaccatcagtatcgatacaagcaagaatcagttcagcctgaggctgtcctccgtgacagccgctgagaaagccgtgtactattgtgcaagacatggccgtgggactattggatattttgattactggggacaagggacactcgtgaccgtgtcctcc

SEQ ID NO: 1181 - DNA, 321 bp, synthetic construct
  source 1..321: mol_type = other DNA
gatattcaaatgactcagagtccttcttcactgtcagcctctgttggcgaccgggtcactataacttgtagggcttcgcagtcaatctcctcatacctgaactggtaccagcagaagcccggcaaagcgccgaaacttttgatatatgcagccagttccttactgaccggagtacctagtcgcttcaccggcagcgggagcgggacagacttcacgctcacgattagttccttgcagcccgaggactttggaacctattactgccaacagtcttatagcccacctcttacgtttggcggcggcacaaaggtggaaatcaag

SEQ ID NO: 1182 - DNA, 360 bp, synthetic construct
  source 1..360: mol_type = other DNA
caggtccagcttctggaaagcggcggcgggctggtacagccaggaggctccttgcggttatcatgtgccgctagtggattcaccttttctagctctgcaatggcctgggtgcgccaggcaccgggaaaaggtctggagtgggtcagcgcaatatcaagctctggtgacaacacctactatgccgatagtgtcaagggaaggttcaccatctcgagagacacatctaaaaatactcttagccttcagatgtcctccctccgagctgaggacacagcgatctactattgcgctaagcaaggaacaaattggggactctactttgattattggggtcagggaacactcgtgactgtgtcctcc

SEQ ID NO: 1183 - DNA, 321 bp, synthetic construct
  source 1..321: mol_type = other DNA
gacattcagatgacccagtctcctagttcactgtcagcctctgtgggcgacagagtgaccattgcatgcagggcctctcaggttattagtaactacttggcttggtaccagcagaaacctgggaaggttcccaaactgctgatatacgtagcttcgactctacagtcaggcgtgccatcccgttttagcggaagcggtagcggcactgatttcacgctcaccatctcctccctgcaacccgaggatgttgccacgtattattgtcaaaactacaatagtgcgccttggactttcgggcaagggacaaagttagagatcaag

SEQ ID NO: 1184 - DNA, 372 bp, synthetic construct
  source 1..372: mol_type = other DNA
caggtccaactgcaagaatcgggccctgagttagttaaacctagcgaaacgttgtccattacatgtaccgtgagtggtggctctatctcctccagaagttattattggggctggattagacagccacctgggaaagggctcgagtggatcgggtccatatactacggaggcagcacctactataatccaagtctgaagagtcgagtaactatatcagcggatacgagcaagaaccagtttagccttaaacttaacagtgtgaccgccgctgatactgctgtgttctattgtgtccgccacccggctggatatagcactcgttggagtgcatttgatatttggggacaaggcacaatggtgactgtgtcctcc

SEQ ID NO: 1185 - DNA, 318 bp, synthetic construct
  source 1..318: mol_type = other DNA
gagattgtcttgacccagtctccctcttcactgtcggcctctgttggggaccgcgtaaccattacctgccgggcctctcagtcaatcagttcttacctgaattggtaccagcagaagccagggcgggcacccgaactgctgatctacgcagccagcagcctgcagtctggggtgccctcgaggtttagcggctcaggaagcggaacagacttcacactcacaatctcctccctccaacccgaggacttcgccacatactattgccagcaatcattttcctccctaaccttcggccagggtactaggctcgaaatcaag

SEQ ID NO: 1186 - DNA, 372 bp, synthetic construct
  source 1..372: mol_type = other DNA
caagtgcagctccaggagagcgggccagggctggtgaaaccaagtgaaacgctgtccctgacttgcacggttagcggcggctcgatctcctccagatcatattactggggatggatccgacagcctcccggcaaagggccggagtggattggaagtatctactatagcgggtctacattctacaatccctccctaaaatccagagttaccattagtgaggacaccagcaaatcacagttcagcttaaaggtcactagcgttactgccgcagataccgctgtgtactattgcgcccgtcacccagccggatacagttcttcttggtctgcctttgatatatggggtcagggaactatggtaacagtgtcctcc

SEQ ID NO: 1187 - DNA, 318 bp, synthetic construct
  source 1..318: mol_type = other DNA
gagattgtgctgacacagagcccttcttcgctgagtgccagtgtcggagatcgggtcacaattacctgtagggcatcacagtcaatctcctcctacctgaactggtaccagttgaagcctggcaaggctcccaaacttttgatatacgctgcttccagcctgcatagcggtgtgccttcacgcttttctggatctggtagcgggacagacttcacgctcaccattagttctttacaacccgccgacttcgcaacctattattgtcaacaggcgtatatctctcttacatttggccaagggaccaggctcgaaatcaag

SEQ ID NO: 1188 - DNA, 366 bp, synthetic construct
  source 1..366: mol_type = other DNA
caggtacagctggtcgaatccggtggcggattggtacagccaggaaggagtttacggctttcctgtagtggatctggttttacgagcggtgattatgcagtgtcctgggttagacaggcacccgggaaaggcctagagtgggttggcttcatcagaaccaagccttacggagaaaccacagagtacgctgccagtgtgaaaggccgattcaccattagccgcgacgacagcaagagtatcgcctatctccagatgaactctctcaaagctgaagacacagcggtgttctactgtaccttcatacccgtcagccgttttttagagtggttgccgtggggacaagggattcctgtgactgtgtcctcc

SEQ ID NO: 1189 - DNA, 321 bp, synthetic construct
  source 1..321: mol_type = other DNA
gatattcagatgacacagagccctagctccctttccgcttttgtcggcgaccgggtgactattacttgcagggcctcgcaggacataggcaattacctggcctggtatcaacagacgcctgaaaaagtcccgaaactgctgatctacgctgcctcgactctccagtcaggcgtgccctctcgcttttctgggtctggatcagggacagatttcactctgaccatctcatcactgcaaccagaggatgtcgcaacctattactgccaaaactactattcagttccctggacctttggccaagggacaaaggtggagatcaag

SEQ ID NO: 1190 - DNA, 360 bp, synthetic construct
  source 1..360: mol_type = other DNA
caagtgcagctcctagagtcgggcggtgggttggttcaacctggagccagccttcggttatcctgtgccgcaagtggtttcaccttttctacctacgccatgacctgggtcaggcaggcacctggcaaaggtttagagtgggtgagtgggattaacggcggaggtgacaccacctattatgcagatagtgttaaagggcgattcaccatatcccgcgacaattccaagaacacgctttacctacagatgaacagcttgagggccgaagatacggctgtctactattgtgctgtccgtggctatacttacggctattttttcgattactggggacaaggaacgctcgtgacagtgtcctcc

SEQ ID NO: 1191 - DNA, 321 bp, synthetic construct
  source 1..321: mol_type = other DNA
gatattcagatgactcagtctccttcgtcactgtcagcgagcgtaggcgaccgggtcactattacttgcagggcctctcaaggaatcagtaattacctggcttggtaccagcagcgcccagggaaagttccaaagctgctgatctacgccgcatcaacactgagatcaggcgtgccctctagatttagcgggtcagggtctgggacagacttcaccctcactatcagctccctccagcccgaggacgtggcgacctattattgccagaagtacaattccgctccgctgacatttggcggaggcacaaaggtggaaatcaag

SEQ ID NO: 1192 - DNA, 375 bp, synthetic construct
  source 1..375: mol_type = other DNA
caggttcagttgcaggaatcgggcccaggcctggtcaaaccgagtgaaacgctgtccttaacctgcaccgtatctggaggcagcatctcctcaagctcttattactggggctggattaggcagccacccggcaaaggcctggagtggattggttccttgtactacagcgggagcacctattacaacccaagcctgaagtcccgagtaaccattagtgtggacacttccaagaaccaattcagtctgaagctcaactctgtgaccgctgcggatactgccgtgtactattgcacgaggcaccctagaggaattgccgctcgttggggaaattggtttgatccctggggtcagggtacactcgtgacagtgtcctcc

SEQ ID NO: 1193 - DNA, 321 bp, synthetic construct
  source 1..321: mol_type = other DNA
gagatcgtcctgacacagagtccctcatcactgagtgcctctgttggggatcggctaaccattacatgtagagcctcccagaccatctcatcatatcttaattggtatcagcaaaaacccgggaaggcacctaaagtgctgatctacgcagcatcctctcttcagagcggcgtcccatctcgctttagcggttctgggtctgggactgacttcactctcactatctcatcattgcaacctgaggacttcgctacatactattgccagcagtccttcatcataccttacacgtttggacaaggcacaaagctcgagataaag

SEQ ID NO: 1194 - DNA, 366 bp, synthetic construct
  source 1..366: mol_type = other DNA
caagtgcaactgcaagaatcagggcctggtttggtcaagccatctgagacactttccttaacttgtacggtatctggtgggtcaatctcctcctcatcatattaccgcgggtggattaggcagccacccggcaaaggactggagtggattggaagtatatactattccggctcaacgtactacaacccaagcctgaagagtcgggtcactataagtgtggacactagcaagaatcaattttccctgaaactctcgagcgttaccgcagccgataccgcggtgtactattgtgctagacaccctcgagggagctatggcgctaatttcgactattggggtcagggaacattggttactgtgtcctcc

SEQ ID NO: 1195 - DNA, 321 bp, synthetic construct
  source 1..321: mol_type = other DNA
gaaattgtactcacacagagtccatcttccctttccgcaagtgtcggagacagagttactattacttgcagggcctctcagagcatctctagttacctgaactggtaccagcagaaaccgggcaaagcacccaagctcctaatctacgctgccagctctctgcagtctggtgtgcctagtcgtttttcaggaagcggctccggaacagatttcaccctcaccatcagctcgttacagccggaggacttcgccacctattactgccagcagagctattctacacccttcacctttggacccggcacaaaagtggatatcaag

SEQ ID NO: 1196 - DNA, 366 bp, synthetic construct
  source 1..366: mol_type = other DNA
caggttcagttagttgagtctggtggcgggcttgtccaacccggtaggagcttgcggctgagttgcatagggagtgggttcacgtttggggaatatgccatgagttgggtgaggcaggcacctggcaaagggctagagtgggtggggttcatcagaaccaagccatacggtggcaccactgaatttgcggcaagcgtgaagggaagattcacgatgtcccgcgatgactccaaatcaatcgcctatctcgagatgaactccctcaagaccgaggacactgcggtgtactattgtacactcatacccgcccttcgttttctggagtggttgccctggggacaaggcacattggtgacagtgtcctcc

SEQ ID NO: 1197 - DNA, 321 bp, synthetic construct
  source 1..321: mol_type = other DNA
gacattcagatgacccaatctccttcttctctgagtgcttcggttggggatcgggtcactgtcacctgtcgcgctaaccaggacattaacaattacctggcttggtaccagcagacacccggcaaagtaccaaaactccttatttacgccgcaagcactctgcagagcggagtaccaagtcgattcagcggatcaggctctgggactgatttcacactgaccatctcctcactgcaacctgaggacgtcgccacgtactattgccagaattattacagcgtgccctggacctttggtcagggaacaaagctggaaatcaag

SEQ ID NO: 1198 - DNA, 363 bp, synthetic construct
  source 1..363: mol_type = other DNA
caagtgcaactgcaagagagcggaccagggctggtgaaaccctctgagaccctttccctgacctgtacggtttcaggagggtccgtgtcctccggtagttattactggtcatggattagacagcctccgggtaaagggttagagtggattggctacatattctactccgggtctacgtactataaccctagtttgaagtcgcgcgttaccattagcgtggacactagcaagaaccaattctcccttaagctcaccagtgtgacagccgcagacaccgctgtctacttttgcgctaggtggatgaccactgtcaaaggctactttgattattggggtcagggaaccctggtaactgtctcctcc

SEQ ID NO: 1199 - DNA, 321 bp, synthetic construct
  source 1..321: mol_type = other DNA
gagatcgttctgacccagtcacctgatttccagagcgtaacacctaaagaatctgtgactataacttgtcgggcaagccagtctgtcggatcaggcctccactggtaccagcagaagcccgaccagagtcccaagctcctaatcaaatatgccagtcagagcttctcaggagtcccaagtcgattttcagggagtggcagcggaacagatttcacattgacaatcaattccctggaagccgaggacgcggccacatattattgcctccaatctagcagcctgccctggacttttgggcaaggcacgaaggtggaaatcaag

SEQ ID NO: 1200 - DNA, 369 bp, synthetic construct
  source 1..369: mol_type = other DNA
caggttcagttgcaggaaagcgggcccgggctggtcaaaccatcagaaaccttgtccttaacctgtaccgtaagcggcggaagtgtgtcctccgcttcatattattggtcgtggataaggcagccacccggaaaagggctcgagtacattggatacatctactattcaggatctacttactacaacccaagcctgaagtcaagagtgaccatctccattgatacctccaagaatcagttcagtcttaatctcaggagtgtcactgctgccgacacagcggtgtactattgcgccagatacatcgtcggtcgtcccggcttcaactggtttgacccgtggggtcagggtacactcgtgactgtgtcctcc

SEQ ID NO: 1201 - DNA, 321 bp, synthetic construct
  source 1..321: mol_type = other DNA
gatattcagatgacccaaagccctagttccctgtccgcaagtgttggggaccgggtgactattacatgccgagcttctcaaagcatcagctcatacctgaactggtaccagcagaaacccggcaaggcacctaagttcctgattagcccagcctctagcctgcagtctggcgtacccagtcgcttttctgggtccggctctggcacggatttcacgctaacaatcagctcgcttcagccggaggactttgccacttattattgccagcaatcatatagcataccttggacatttggccaagggacaaaggtggaaatcaag

SEQ ID NO: 1202 - DNA, 369 bp, synthetic construct
  source 1..369: mol_type = other DNA
caagtgcagctccaagaatcagggcccgggttggttaaaccaagtgaaaccctttccctgacttgcaccgttagcggagattctgtgtcctccgtgtcctattactggagctggatacgacagccacctggcaagggactggagtggattggctacatctggtacagcggcagcacctattacaacccaagtctaaagtctcgggtgacaatttccattgacacttcaaagaatcagttcagcctgaagttaaggagtgtgaccgcagccgacactgcggtgtactattgtgcaagatacatcgtaggccgtcccggtttcaactggttcgatccctggggtcagggaacattggtgacagtatcctcc

SEQ ID NO: 1203 - DNA, 321 bp, synthetic construct
  source 1..321: mol_type = other DNA
gatattcagatgactcagagtccctcatccctttccgcttctgtcggcgaccgcgttacaatcacctgtagggcctcgcagacaatcagttcgtacctgaactggtatcaacagaaacctgggaaggctcctaaactcctcataagtcctgcctcaaatttacagtctggggtcccaagcagattttctggatcagggtctgggacggatttcaccctgactatcagctcgctgcagccggaggactttgccacgtattattgccagcaatcatacatcattccctggacctttggccagggaacaaaggtcgagatcaag

SEQ ID NO: 1204-1208 - skipped (5 entries)

SEQ ID NO: 1209 - DNA, 738 bp, synthetic construct
  source 1..738: mol_type = other DNA
caggttcaactgcaagagtctgggcccggattggtgaagccaagtgaaaccctttccctgacttgtacggtatccggcggttcggtgtcctccgggaatttctactggtcatggattagacagccacctggtaaagggctggaatggattgggtacatctactactctggaagcacttactataacccatctcttaaaagtagagtcaccataagtgtggacacaagcaagaaccagttcagcctgaagctgcgttctttaaccgccgcggacacagccgtgtattactgcgctaggtggatgaccaaagtaaagggctatttcgattattggggacaagggacattggtcacagtgtcctccggctcaactagcggtagtggtaaacctggcagcggcgagggaagtacgaaaggcgagatagtcctgactcagtctccagattttcagtcggtgacgcctaaggagaaggttactattacctgccgagcatcacagtctgtgggcagcgggctccactggtatcaacagaaaccggatcagagccctaagctcctcatcaaatatgccagtcagtcattttctggagtgccctcccggttttccggcagcggctcaggaaccgacttcaccctgacaatcaatagcctcgaggtcgaagacgcagccaccttctactgtctacagtcttcatccttaccctggacttttggacaagggacaaaggttgaaatcaag

SEQ ID NO: 1210 - DNA, 738 bp, synthetic construct
  source 1..738: mol_type = other DNA
caggtccaactgcaagaatcgggacccgggctggttaagccttccgaaacgttgagtctgacctgtaccgtatctggaggctcggtgtcctccggcagttattattggagctggattcggcaggcaccagggaaagggctggaatggattggatacatctactactcaggatcaaactactataatccatccctgaagagtagggtcacaatcagtgtggacaccagcaaaaaccaattctccttgaaacttagagccgtcactgcggcagataccgctgtgtactattgcgcgcgttggatgactaccatcaaaggctacttcgattactggggtcagggtacactcgttaccgtgtcctccggaagcacatctggttctgggaaacctggctctggcgagggttcaacgaagggcgaaatagtattaacgcagtctccagactttcagtcagtgacacctaaggagaaagttactataacctgccgagcctcacaatctgtgggaagtggcctacattggtatcagcaaaagcccgaccagagcccaaagctcctcatcaaatatgcttcacagagcttcagcggtgtgccctctcgcttctccgggtctggctccggcactgactttacactgactattaatagccttgagaccgaggatgccgcaacctacttttgtcaacaaagcagcagcttaccgtggacatttggacaagggacaaaggtcgagatcaag

SEQ ID NO: 1211 - DNA, 741 bp, synthetic construct
  source 1..741: mol_type = other DNA
caagtgcagctggtcgaatctggaggcggcctggtccagcccggaaggagcttgcgactgtcatgcaccggttccgggttcacgtttggggattatgccatgaactgggtcaggcaggctcctggaaagggactggagtgggtggggttcatcagaaccaagccctatggtggaactaccgaatatgccgcctctgttaaaggaagattcacctttagccgcgatgactccaaaagcatcgcatacctccagatgaactcactcaaaacagaggacaccgcggtgtattactgcacaatgatcccagtcctgcggttccttgagtggctgccgtggggacaaggcacactcgtgacagtgtcctccggttctactagcggaagtggcaaaccgggttctggggagggctcgaccaagggcgatattcagatgactcagagtccctcatccctatcagcaagtgttggggaccgcgtgaccattacatgtcgggcctcccaggacatcaataattacctagcttggtatcaacagaagcctggcaaagtaccaaaactcttgatatacgccgcttcgactcttcagagcggtgtccctagtcgtttttcaggcagcggctctggcactgatttcacgttaacaatatccagcttacagccagaggacgtagcaacttactattctctgaactactacagcgttccctggacctttgggcaagggacaaaggtggaaattaag

SEQ ID NO: 1212 - DNA, 735 bp, synthetic construct
  source 1..735: mol_type = other DNA
gatattcagatgactcaatcgccctcttccctgagcgccagtgtcggagatcgagtaaccatcacttgtagggctagtcaaggaatctctaactatctggcctggtaccagcagaagcctgggaaagttccgaaccttctcatctacacagcaagcaccctccagtctggggttcctagtaggttttcagggtctggcagcggtactgacttcacgctgactatttcatccttgcaacccgaggatgttgcaacttattattgccagaagtacaatagcgctccattcacctttggcccagggacaaaggtggacatcaagggctcgacatctggtagcggcaaacctggctctggcgagggaagtaccaagggacaggtccagctgctggaaagcggtggtgggctggtccaacctggaggatcattgcggctgtcctgcgccgccagtgggttcacctttagctcctacgccatgaattgggtgcgccaggctcccggcaaaggcctagagtgggtgtctgccattagcggcggagtcgggaatacctactatgcggacagcgtgaaagggcggtttacaatatcacgcgacaactccaaaaacaccttatacttacagatgaactcacttagagctgaagataccgcagtgtactattgtacgaaggacggtccactctggggcaattatttcgattactggggacgtggcacactcgtgacagtgtcctcc

SEQ ID NO: 1213 - DNA, 735 bp, synthetic construct
  source 1..735: mol_type = other DNA
caagtgcagctgctggaatctggcggcgggctggtgcaacctggagggagcttgcggttatcatgcgccgcctctggcttcaccttctcctcctatgccatgaattgggttaggcaggctcctgggaaaggtctggagtgggtaagcgctattagtggtggagtgggaaacacatattatgccgattctgtgaagggacgctttacaatctcgagagacaacagcaaaaatactctgtaccttcaaatgaactccctccgagccgaggataccgcagtgtactattgcacaaaggacgggccactttggggcaactattttgattactggggcagaggaacattggtaaccgtgtcctccgggagtacatctggcagcgggaaacccggctctggggaaggttcaaccaagggcgacattcagatgactcagtcacctagctcactgtcagcgtcagtcggagatcgggttactattacgtgtagggctagtcagggtatcagcaattacctcgcctggtaccagcagaaacccggcaaagtcccaaacctgctcatctacactgcaagcaccctacagagcggtgttccatcccgtttttctggatcgggatctgggacggatttcaccctcaccatatcctccttacaacccgaggacgtcgcaacttattactgtcagaagtacaatagtgctcccttcacgtttggcccgggcacaaaggtggacatcaag

SEQ ID NO: 1214 - DNA, 738 bp, synthetic construct
  source 1..738: mol_type = other DNA
gatattcaaatgactcagagtccttcttcactgtcagcctctgttggcgaccgggtcactataacttgtagggcttcgcagtcaatctcctcatacctgaactggtaccagcagaagcccggcaaagcgccgaaacttttgatatatgcagccagttccttactgaccggagtacctagtcgcttcaccggcagcgggagcgggacagacttcacgctcacgattagttccttgcagcccgaggactttggaacctattactgccaacagtcttatagcccacctcttacgtttggcggcggcacaaaggtggaaatcaagggttctacaagcggatctgggaaacccgggagcggagaaggttctaccaagggacaggtccaactacaggagtcgggccctgggctggtgaagccatctgaaaccctgtcactcacttgctctgttagtggtggttcaatctcctccagctcatattactggggctggattagacagccacccggaaaagggttagagtggataggcagtatcgactacagcggtagcacctattacaacccaagcctcaagtcccgagtcaccatcagtatcgatacaagcaagaatcagttcagcctgaggctgtcctccgtgacagccgctgagaaagccgtgtactattgtgcaagacatggccgtgggactattggatattttgattactggggacaagggacactcgtgaccgtgtcctcc

SEQ ID NO: 1215 - skipped

SEQ ID NO: 1216 - DNA, 735 bp, synthetic construct
  source 1..735: mol_type = other DNA
gatatacagatgactcagtcgcccagctcattgagtgcgagtgtcggagatcgcgtgaccattgcgtgcagggcttcacaagtgattagcaattacctggcctggtatcagcaaaaaccgggcaaggtgcctaagctgctgatatacgtcgcctcgactctccagagtggcgtgccttctagattttcagggagtggcagcggaaccgatttcaccctgaccatctcatcactgcaaccagaggacgtagccacctattactgccagaattataacagcgcaccctggacatttgggcagggtacaaagctggaaatcaagggttctacatctgggtctgggaaacctgggtctggggagggctccaccaagggacaggttcagcttcttgaaagtggcggcggattagtgcagccaggaggttctttgcggctttcatgtgcagccagtggcttcaccttctcctcctctgctatggcctgggttcgacaggctcccggaaaagggctagagtgggttagcgctatctcctcctctggcgataatacttactacgccgacagcgtaaaaggcaggttcacgattagcagagacactagcaaaaacacgctcagcctccagatgtcctccctgcgtgccgaggacactgcaatctactattgtgcaaagcagggaacaaactggggcttatactttgactattggggtcaaggaacattggtcacagtgtcctcc

SEQ ID NO: 1217 - DNA, 735 bp, synthetic construct
  source 1..735: mol_type = other DNA
caggtccagcttctggaaagcggcggcgggctggtacagccaggaggctccttgcggttatcatgtgccgctagtggattcaccttttctagctctgcaatggcctgggtgcgccaggcaccgggaaaaggtctggagtgggtcagcgcaatatcaagctctggtgacaacacctactatgccgatagtgtcaagggaaggttcaccatctcgagagacacatctaaaaatactcttagccttcagatgtcctccctccgagctgaggacacagcgatctactattgcgctaagcaaggaacaaattggggactctactttgattattggggtcagggaacactcgtgactgtgtcctccggctcaacatctgggagtggcaaacccgggagcggcgaagggagcaccaagggcgacattcagatgacccagtctcctagttcactgtcagcctctgtgggcgacagagtgaccattgcatgcagggcctctcaggttattagtaactacttggcttggtaccagcagaaacctgggaaggttcccaaactgctgatatacgtagcttcgactctacagtcaggcgtgccatcccgttttagcggaagcggtagcggcactgatttcacgctcaccatctcctccctgcaacccgaggatgttgccacgtattattgtcaaaactacaatagtgcgccttggactttcgggcaagggacaaagttagagatcaag

SEQ ID NO: 1218 - DNA, 744 bp, synthetic construct
  source 1..744: mol_type = other DNA
gagattgtcttgacccagtctccctcttcactgtcggcctctgttggggaccgcgtaaccattacctgccgggcctctcagtcaatcagttcttacctgaattggtaccagcagaagccagggcgggcacccgaactgctgatctacgcagccagcagcctgcagtctggggtgccctcgaggtttagcggctcaggaagcggaacagacttcacactcacaatctcctccctccaacccgaggacttcgccacatactattgccagcaatcattttcctccctaaccttcggccagggtactaggctcgaaatcaagggctcaacttctgggagcggcaaacctggtagcggagagggttctaccaagggacaggtccaactgcaagaatcgggccctgagttagttaaacctagcgaaacgttgtccattacatgtaccgtgagtggtggctctatctcctccagaagttattattggggctggattagacagccacctgggaaagggctcgagtggatcgggtccatatactacggaggcagcacctactataatccaagtctgaagagtcgagtaactatatcagcggatacgagcaagaaccagtttagccttaaacttaacagtgtgaccgccgctgatactgctgtgttctattgtgtccgccacccggctggatatagcactcgttggagtgcatttgatatttggggacaaggcacaatggtgactgtgtcctcc

SEQ ID NO: 1219 - DNA, 744 bp, synthetic construct
  source 1..744: mol_type = other DNA
gagattgtgctgacacagagcccttcttcgctgagtgccagtgtcggagatcgggtcacaattacctgtagggcatcacagtcaatctcctcctacctgaactggtaccagttgaagcctggcaaggctcccaaacttttgatatacgctgcttccagcctgcatagcggtgtgccttcacgcttttctggatctggtagcgggacagacttcacgctcaccattagttctttacaacccgccgacttcgcaacctattattgtcaacaggcgtatatctctcttacatttggccaagggaccaggctcgaaatcaagggctcgactagcggttcagggaagccaggcagcggcgaaggctcaaccaagggacaagtgcagctccaggagagcgggccagggctggtgaaaccaagtgaaacgctgtccctgacttgcacggttagcggcggctcgatctcctccagatcatattactggggatggatccgacagcctcccggcaaagggccggagtggattggaagtatctactatagcgggtctacattctacaatccctccctaaaatccagagttaccattagtgaggacaccagcaaatcacagttcagcttaaaggtcactagcgttactgccgcagataccgctgtgtactattgcgcccgtcacccagccggatacagttcttcttggtctgcctttgatatatggggtcagggaactatggtaacagtgtcctcc

SEQ ID NO: 1220 - DNA, 741 bp, synthetic construct
  source 1..741: mol_type = other DNA
gatattcagatgacacagagccctagctccctttccgcttttgtcggcgaccgggtgactattacttgcagggcctcgcaggacataggcaattacctggcctggtatcaacagacgcctgaaaaagtcccgaaactgctgatctacgctgcctcgactctccagtcaggcgtgccctctcgcttttctgggtctggatcagggacagatttcactctgaccatctcatcactgcaaccagaggatgtcgcaacctattactgccaaaactactattcagttccctggacctttggccaagggacaaaggtggagatcaagggatctacaagcgggagtggcaagccagggagcggagagggtagcaccaagggtcaggtacagctggtcgaatccggtggcggattggtacagccaggaaggagtttacggctttcctgtagtggatctggttttacgagcggtgattatgcagtgtcctgggttagacaggcacccgggaaaggcctagagtgggttggcttcatcagaaccaagccttacggagaaaccacagagtacgctgccagtgtgaaaggccgattcaccattagccgcgacgacagcaagagtatcgcctatctccagatgaactctctcaaagctgaagacacagcggtgttctactgtaccttcatacccgtcagccgttttttagagtggttgccgtggggacaagggattcctgtgactgtgtcctcc

SEQ ID NO: 1221 - DNA, 735 bp, synthetic construct
  source 1..735: mol_type = other DNA
gatattcagatgactcagtctccttcgtcactgtcagcgagcgtaggcgaccgggtcactattacttgcagggcctctcaaggaatcagtaattacctggcttggtaccagcagcgcccagggaaagttccaaagctgctgatctacgccgcatcaacactgagatcaggcgtgccctctagatttagcgggtcagggtctgggacagacttcaccctcactatcagctccctccagcccgaggacgtggcgacctattattgccagaagtacaattccgctccgctgacatttggcggaggcacaaaggtggaaatcaagggctctacaagtggtagcggaaaacccggtagcggcgaagggagcaccaagggacaagtgcagctcctagagtcgggcggtgggttggttcaacctggagccagccttcggttatcctgtgccgcaagtggtttcaccttttctacctacgccatgacctgggtcaggcaggcacctggcaaaggtttagagtgggtgagtgggattaacggcggaggtgacaccacctattatgcagatagtgttaaagggcgattcaccatatcccgcgacaattccaagaacacgctttacctacagatgaacagcttgagggccgaagatacggctgtctactattgtgctgtccgtggctatacttacggctattttttcgattactggggacaaggaacgctcgtgacagtgtcctcc

SEQ ID NO: 1222 - DNA, 750 bp, synthetic construct
  source 1..750: mol_type = other DNA
gagatcgtcctgacacagagtccctcatcactgagtgcctctgttggggatcggctaaccattacatgtagagcctcccagaccatctcatcatatcttaattggtatcagcaaaaacccgggaaggcacctaaagtgctgatctacgcagcatcctctcttcagagcggcgtcccatctcgctttagcggttctgggtctgggactgacttcactctcactatctcatcattgcaacctgaggacttcgctacatactattgccagcagtccttcatcataccttacacgtttggacaaggcacaaagctcgagataaagggatcgactagcggcagcgggaaacctggtagcggcgaaggaagtaccaagggacaggttcagttgcaggaatcgggcccaggcctggtcaaaccgagtgaaacgctgtccttaacctgcaccgtatctggaggcagcatctcctcaagctcttattactggggctggattaggcagccacccggcaaaggcctggagtggattggttccttgtactacagcgggagcacctattacaacccaagcctgaagtcccgagtaaccattagtgtggacacttccaagaaccaattcagtctgaagctcaactctgtgaccgctgcggatactgccgtgtactattgcacgaggcaccctagaggaattgccgctcgttggggaaattggtttgatccctggggtcagggtacactcgtgacagtgtcctcc

SEQ ID NO: 1223 - DNA, 741 bp, synthetic construct
  source 1..741: mol_type = other DNA
gaaattgtactcacccaaagcccaagctccctgtccgcctctgttggtgatcgggtcacaataacatgcagggcgtcacagagcatctcctcctacctgaactggtaccagcagaagcctggcaaggcaccgaagctgctgatatacgccgcctctagtctacagtctggggtgccctctcgctttagcggcagcgggagtggaacggacttcactctcacgatttcatcgttgcaacccgaggactttgcaacatattattgccagcagagctatagcactccattcaccttcgggcctgggacaaaggtcgatatcaagggaagcacttcaggaagtggcaaacctgggtctggggagggttcgaccaagggacaggtccaactgcaagaatcaggtcccgggctggttaaaccttcagaaaccttgtccttaacttgtaccgtatcaggcggaagtatctcctcctcttcttattatcgaggctggattagacagccacccggcaaaggccttgagtggattggctccatctactacagcggcagcacgtactataacccaagcctgaaaagtagggtgactatctctgtggacacttctaagaatcagttcagtctcaaactttcatccgtgaccgccgcggacaccgctgtgtactattgtgctagacacccgcgtggaagttacggcgctaattttgattactggggtcagggaacactcgttacagtgtcctcc

SEQ ID NO: 1224 - DNA, 741 bp, synthetic construct
  source 1..741: mol_type = other DNA
caagtgcaactgcaagaatcagggcctggtttggtcaagccatctgagacactttccttaacttgtacggtatctggtgggtcaatctcctcctcatcatattaccgcgggtggattaggcagccacccggcaaaggactggagtggattggaagtatatactattccggctcaacgtactacaacccaagcctgaagagtcgggtcactataagtgtggacactagcaagaatcaattttccctgaaactctcgagcgttaccgcagccgataccgcggtgtactattgtgctagacaccctcgagggagctatggcgctaatttcgactattggggtcagggaacattggttactgtgtcctccggcagcaccagcgggtcagggaaacctgggagcggcgaaggctctaccaagggcgaaattgtactcacacagagtccatcttccctttccgcaagtgtcggagacagagttactattacttgcagggcctctcagagcatctctagttacctgaactggtaccagcagaaaccgggcaaagcacccaagctcctaatctacgctgccagctctctgcagtctggtgtgcctagtcgtttttcaggaagcggctccggaacagatttcaccctcaccatcagctcgttacagccggaggacttcgccacctattactgccagcagagctattctacacccttcacctttggacccggcacaaaagtggatatcaag

SEQ ID NO: 1225 - DNA, 741 bp, synthetic construct
  source 1..741: mol_type = other DNA
gacattcagatgacccaatctccttcttctctgagtgcttcggttggggatcgggtcactgtcacctgtcgcgctaaccaggacattaacaattacctggcttggtaccagcagacacccggcaaagtaccaaaactccttatttacgccgcaagcactctgcagagcggagtaccaagtcgattcagcggatcaggctctgggactgatttcacactgaccatctcctcactgcaacctgaggacgtcgccacgtactattgccagaattattacagcgtgccctggacctttggtcagggaacaaagctggaaatcaagggctcaacttctggctcaggaaaaccgggcagcggtgaaggctccaccaagggacaggttcagttagttgagtctggtggcgggcttgtccaacccggtaggagcttgcggctgagttgcatagggagtgggttcacgtttggggaatatgccatgagttgggtgaggcaggcacctggcaaagggctagagtgggtggggttcatcagaaccaagccatacggtggcaccactgaatttgcggcaagcgtgaagggaagattcacgatgtcccgcgatgactccaaatcaatcgcctatctcgagatgaactccctcaagaccgaggacactgcggtgtactattgtacactcatacccgcccttcgttttctggagtggttgccctggggacaaggcacattggtgacagtgtcctcc

SEQ ID NO: 1226 - DNA, 738 bp, synthetic construct
  source 1..738: mol_type = other DNA
gagatcgttctgacccagtcacctgatttccagagcgtaacacctaaagaatctgtgactataacttgtcgggcaagccagtctgtcggatcaggcctccactggtaccagcagaagcccgaccagagtcccaagctcctaatcaaatatgccagtcagagcttctcaggagtcccaagtcgattttcagggagtggcagcggaacagatttcacattgacaatcaattccctggaagccgaggacgcggccacatattattgcctccaatctagcagcctgccctggacttttgggcaaggcacgaaggtggaaatcaagggctcgacaagcggctctggcaaaccgggctctggtgaagggtctaccaagggacaagtgcaactgcaagagagcggaccagggctggtgaaaccctctgagaccctttccctgacctgtacggtttcaggagggtccgtgtcctccggtagttattactggtcatggattagacagcctccgggtaaagggttagagtggattggctacatattctactccgggtctacgtactataaccctagtttgaagtcgcgcgttaccattagcgtggacactagcaagaaccaattctcccttaagctcaccagtgtgacagccgcagacaccgctgtctacttttgcgctaggtggatgaccactgtcaaaggctactttgattattggggtcagggaaccctggtaactgtctcctcc

SEQ ID NO: 1227 - DNA, 744 bp, synthetic construct
  source 1..744: mol_type = other DNA
gatattcagatgacccaaagccctagttccctgtccgcaagtgttggggaccgggtgactattacatgccgagcttctcaaagcatcagctcatacctgaactggtaccagcagaaacccggcaaggcacctaagttcctgattagcccagcctctagcctgcagtctggcgtacccagtcgcttttctgggtccggctctggcacggatttcacgctaacaatcagctcgcttcagccggaggactttgccacttattattgccagcaatcatatagcataccttggacatttggccaagggacaaaggtggaaatcaagggatcaacctctggctctggcaaacctgggagcggtgagggaagtaccaaaggacaggttcagttgcaggaaagcgggcccgggctggtcaaaccatcagaaaccttgtccttaacctgtaccgtaagcggcggaagtgtgtcctccgcttcatattattggtcgtggataaggcagccacccggaaaagggctcgagtacattggatacatctactattcaggatctacttactacaacccaagcctgaagtcaagagtgaccatctccattgatacctccaagaatcagttcagtcttaatctcaggagtgtcactgctgccgacacagcggtgtactattgcgccagatacatcgtcggtcgtcccggcttcaactggtttgacccgtggggtcagggtacactcgtgactgtgtcctcc

SEQ ID NO: 1228 - DNA, 744 bp, synthetic construct
  source 1..744: mol_type = other DNA
gatattcagatgactcagagtccctcatccctttccgcttctgtcggcgaccgcgttacaatcacctgtagggcctcgcagacaatcagttcgtacctgaactggtatcaacagaaacctgggaaggctcctaaactcctcataagtcctgcctcaaatttacagtctggggtcccaagcagattttctggatcagggtctgggacggatttcaccctgactatcagctcgctgcagccggaggactttgccacgtattattgccagcaatcatacatcattccctggacctttggccagggaacaaaggtcgagatcaagggtagcactagcggcagcggaaaaccgggctctggcgaagggtctaccaagggtcaagtgcagctccaagaatcagggcccgggttggttaaaccaagtgaaaccctttccctgacttgcaccgttagcggagattctgtgtcctccgtgtcctattactggagctggatacgacagccacctggcaagggactggagtggattggctacatctggtacagcggcagcacctattacaacccaagtctaaagtctcgggtgacaatttccattgacacttcaaagaatcagttcagcctgaagttaaggagtgtgaccgcagccgacactgcggtgtactattgtgcaagatacatcgtaggccgtcccggtttcaactggttcgatccctggggtcagggaacattggtgacagtatcctcc

SEQ ID NO: 1229 - DNA, 744 bp, synthetic construct
  source 1..744: mol_type = other DNA
caggtccaactgcaagaatcgggtccagggctggtgaaacccagcgaaacccttagtctgacttgtaccgtatccggagactccgtgtcctccgtcagttattattggagctggattcggcagccacctgggaagggcctggagtggattggctacatctggtactctgggtcaacttactataacccatcgctcaaaagccgcgtaacgataagtatcgacacgagcaaaaatcaattctcattgaagctcaggagcgtgacagccgcagatactgcggtgtactattgtgctagatacatcgtgggtaggcccggcttcaactggtttgatccctggggacaaggcacactcgttaccgtgtcctccggcagcacttcagggtctggaaaaccgggaagcggagagggctctaccaagggcgatattcagatgacccagtctccaagctccctttccgcttctgttggggatcgagtgacaattacatgcagagccagtcagaccatctcatcttacctgaactggtatcagcaaaagcccgggaaggcaccgaaactgctgattagtcccgccagtaatctacagtcaggtgtccctagccgtttctctggaagcggttctggcacggacttcacgttgacaatcagttccttacagcctgaggactttgccacctattactgccagcagtcatacataatcccttggacctttggccagggaacaaaggtcgaaatcaag

SEQ ID NO: 1230 - DNA, 732 bp, synthetic construct
  source 1..732: mol_type = other DNA
caggttcagctcgtccagtctggggcagaagtaaaaaagcctggggctagtgtgaaggtgtcctgtaaggcgtccggatatacattcaccggctataacatccactgggttcggcaggcaccaggccagggactagaatggatgggcgctatatacccaggaaatggagatacttcttatgcccaaaaatttcaaggccgcgttaccatgacagcagataccagcacttctaccgtctacatggagctcagtagccttaggagtgaggacacggctgtgtactattgcgccagaggagaaactgcgcgagccacctttgcctactggggacaaggcacgctggtgacagtgtcctccggcagcacaagcgggtctgggaaacctggttctggggagggctcaacgaagggcgacattcagatgactcagtcaccctcatccctgtccgcctcagtcggagatagagtgaccattacctgtagggcctcgcaggacattgggaacttcctgaattggtaccaacagaaacccggcaaggcaccaaaagtgctgatctactacaccagctccctgtactcaggcgtacccagtcgttttagcggtagtggtagcgggactgactatacattgaccatctcgtctttgcaacctgaagatttcgctacttattactgccagcagtatagcaaactcccgcttacattcggtcagggtacaaagttagagatcaag

SEQ ID NO: 1231 - DNA, 732 bp, synthetic construct
  source 1..732: mol_type = other DNA
caagtgcagttggtacagtctggggcagaggtcaaaaaacccggtgcaagtgttaaaatgagttgcaaggcctccggctacacctttaccggctataacatccattgggttcggcaggcaccgggccagggcctggaatggataggagctatctacccaggcaatggcgatacatcgtatgctcagaagttccaagggcgcgctaccctcaccgcggacactagcacctctacagtgtatatggaactgtctagcctgaggtccgaggacacagcggtgtactattgcgccagaggagagactgcccgagccactttcgcctactggggtcagggtacactcgtgactgtgtcctccgggtctacgtcagggagtggcaaacctgggtctggggagggaagtacgaagggtgatattcagatgactcagagcccaagctcactgtcagcttcggtcggcgatagagtaactattacatgtcgtgccagtcaagacattggaaatttccttaactggtatcagcaaaagcctggaaaggcacccaaagttctaatctactacacaagctccttgtactccggcgtcccaagcaggttttcaggctcaggttctggaacagactataccctgaccatatccagccttcagcccgaggattttgccacctactattgtcaacagtacagcaaactccctctaaccttcgggcagggaacgaagttagaaatcaag

SEQ ID NO: 1232 - DNA, 732 bp, synthetic construct
  source 1..732: mol_type = other DNA
gacattcaaatgactcagtcgccctcttcactgtcagcttctgttggggatcgtgtaaccattacctgtagggcatcccaggatataggaaacttcctgaattggtatcagcaaaagcccggcaaagctccaaagctgctgatctactacaccagcagcctttattcaggtgtcccaagcagattctccggcagcgggtccggcacagacttcaccctgaccatctctagcctacagcccgaggactttgcaacatattattgtcaacagtacagtaaattgccactgacgtttgggcaaggtacaaagctcgagatcaagggctcgacaagcggctcaggcaaaccgggctctggggaaggaagtaccaagggtcaggtccagctcgtacagagtggagccgaagtcaaaaagcctggcgcgagtgttaaagtgtcctgcaaggcctctgggtacacattcaccggttacaacatccactgggttcgacaggctcctggccagggacttgagtggatgggagccatttaccctgggaatggggacacttcttatgcacagaaatttcagggtagggtgactatgactagagatacgtcaacgtccactgtctacatggagttgagtagcttacggagcgaagataccgccgtgtactattgcgctcgcggagagacagcccgggccacttttgcatattggggacaaggcacactcgtgaccgtgtcctcc

SEQ ID NO: 1233 - protein, 107 aa, synthetic construct
DIQMTQSPSSLSASVGDRVTITCRASQGISNYLAWYQQRPGKVPKLLIYAASTLRSGVPSRFSGSGSGTDFTLTISSLQPEDVATYYCQKYNSAPLTFGGGTKVEIK

SEQ ID NO: 1234 - protein, 107 aa, synthetic construct
DIQMTQSPSSLSASVGDRVTITCRASQSISSYLNWYQQKPGKAPKFLISPASSLQSGVPSRFSGSGSGTDFTLTISSLQPEDFATYYCQQSYSIPWTFGQGTKVEIK

SEQ ID NO: 1235 - DNA, 450 bp, synthetic construct
  source 1..450: mol_type = other DNA
cgaccaacccatcaaactccccgcccccagcacttttatttctcctctttaggaagtacacttcagtatctttggcacagtgcatgagcacgactaaagtaaaacatcgcagaaaacatagctttagtctacccttcgtgtcctaaaaggaaaaccagtagcttcccaggccaccggaagggcaacacatgtcctctgcagtttctgcacacgggaaggtaaagacagagagaggacctactcctcaacacagaaacatttcaaaatctttcctcgcctgcaacccaagctgaagtcattctccccagaaataacaaaagttggaagagaagccggagacaggataggtgcaggaagcccacactttgagggcagcactcagacaccctctcctgtgtgcaggacgtgccgaatgttcaggtgcaatgagaatgagccatgcttggctta

SEQ ID NO: 1236 - DNA, 450 bp, synthetic construct
  source 1..450: mol_type = other DNA
cgagggcaatctggcccatcaagtggccttcgcctctgggagtaacaaaaatgcacttcaaaatagcttctgtaatcaagctgcatgggtggagtactccccagctgactccaggaagttctctatccaaagctattcattaggccagagctgtgcaaataattagtcacccacttgctccataaccctccatgacagcccaggcattgagtccaggtgggaccatcaagccatgctctggtggctcatgcattatcatagaaatgggaggctttatttattttactaaaaagaacaaaaacaacagactgctgtcctttagacaataggatcacgtcatctgagccctctgtgccccaggtgacaagcccagccccaagttctctttcctcagcctccccacacatgttctggaggagatgggcccagcaggctgctctgaggcctggc

SEQ ID NO: 1237 - RNA, 20 nt, synthetic construct
  source 1..20: mol_type = other RNA
tcgtaagccaagcatggctc

SEQ ID NO: 1238 - DNA, 6673 bp, synthetic construct
  source 1..6673: mol_type = other DNA
cgactgtgccttctagttgccagccatctgttgtttgcccctcccccgtgccttccttgaccctggaaggtgccactcccactgtcctttcctaataaaatgaggaaattgcatcgcattgtctgagtaggtgtcattctattctggggggtggggtggggcaggacagcaagggggaggattgggaagacaatagcaggcatgctggggatgcggtgggctctatgggataagcttgatatcgaattcatcgatgttaataattaacatatatgttaatcattaacatatagttaattattaaccgctatgttaatgattaacaacggttaataattaacatatatgttaatcattaacatataactagtctagagggtatataatgggggccactagtctactaccagagttcatcgctagcgctaccggatccgccaccatggccctgccagtaacggctctgctgctgccacttgctctgctcctccatgcagccaggcctcaagtgcagctggtccagtctggggcggaagtgaaaaagcccggagctagtgtaaaggtgtcctgtaaagccagcggctacaccttcaccggttattacctgcattgggtccggcaggctcctggccagggcctggagtggatgggctggatttccgcatataacggaaacacaaattacgcccagaacctgcaaggccgcgtgaccatgaccagggacacaagcactagcactgtctacatggagttgtctagcttgagaagcgaagataccgctgtgtactattgcgcccgacactcttactcgggctcatactcaacgctaccctattatgggatggatgtttggggtcaagggacaacggtcacagtatcctctggaggcggtggcagcggaggaggcgggtctggaggtggtggatcagacattcagatgacccagtcaccaagttccttatccgcaagcgttggggatcgtgttacaattacttgcagggcctcgcaagggatctctaattatctcgcttggtaccagcagaaacctgggaaagcacccaagctgctgatctacactgcaagcacactttttccaggagtgccgtcaagattctctgggtccgggagtggcactgacttcacccttaccatctcctccctccagcctgaggactttgccacatattattgtcaacagagttactccataccactcacgtttggcggcggaacaaaagttgaaatcaaggcggcagcaaccacgacgccagcgccgcgaccaccaacaccggcgcccaccatcgcgtcgcagccactgtcactgcgcccagaagcgtgccggccagcggcggggggcgcagtgcatacgagggggctggacttcgcctgtgatatctacatctgggcgcccttggccgggacttgtggggtccttctcctgtcactggttatcaccctttactgcaaacggggcagaaagaaactcctgtatatattcaaacaaccatttatgagaccagtacaaactactcaagaagaggacggctgtagctgccgatttccagaagaagaagaaggaggatgtgaactgagagtgaagttcagcaggagcgcagacgcccccgcgtaccagcagggccagaaccagctctataacgagctcaatctaggacgaagagaggagtacgatgttttggacaagaggcgtggccgggaccctgagatggggggaaagccgagaaggaagaaccctcaggaaggcctgtacaatgaactgcagaaagataagatggcggaggcctacagtgagattgggatgaaaggcgagcgccggaggggcaaggggcacgatggcctttaccagggtctcagtacagccaccaaggacacctacgacgcccttcacatgcaggccctgccccctaggtaaaatcaacctctggattacaaaatttgtgaaagattgactggtattcttaactatgttgctccttttacgctatgtggatacgctgctttaatgcctttgtatcatgctattgcttcccgtatggctttcattttctcctccttgtataaatcctggttgctgtctctttatgaggagttgtggcccgttgtcaggcaacgtggcgtggtctgcactgtgtttgctgacgcaacccccactggttggggcattgccaccacctgtcagctcctttccgggactttcgctttccccctccctattgccacggcggaactcatcgccgcctgccttgcccgctgctggacaggggctcggctgttgggcactgacaattccgtggtgttgtcggggaaatcatcgtcctttccttggctgctcgcctgtgttgccacctggattctgcgcgggacgtccttctgctacgtcccttcggccctcaatccagcggaccttccttcccgcggcctgctgccggctctgcggcctcttccgcgtcttcgccttcgccctcagacgagtcggatctccctttgggccgcctccccgcctggatccttgacttgcggccaacttgtttattgcagcttataatggttacaaataaagcaatagcatcacaaatttcacaaataaagcatttttttcactgcattctagttgtggtttgtccaaactcatcaatgtatcttatcatgtctgggatccttgacttgcggccgcaactcccacctgcaacatgcgtgactgactgaggccgcgactctagagtcgaccggatctgcgatcgctccggtgcccgtcagtgggcagagcgcacatcgcccacagtccccgagaagttggggggaggggtcggcaattgaacgggtgcctagagaaggtggcgcggggtaaactgggaaagtgatgtcgtgtactggctccgcctttttcccgagggtgggggagaaccgtatataagtgcagtagtcgccgtgaacgttctttttcgcaacgggtttgccgccagaacacagctgaagcttcgaggggctcgcatctctccttcacgcgcccgccgccctacctgaggccgccatccacgccggttgagtcgcgttctgccgcctcccgcctgtggtgcctcctgaactgcgtccgccgtctaggtaagtcgactcgttggatccccactacccggatcaacgccctaggtttatgtttggatgaactgacatacgcgtatccgtcttaagaatcttttcaaacactagtagtgaaatatatattaaactagtgtttgaaaagattcttattacggtaacgcggaattcgcaactattttatcaattttttgcgtcgacacttcaaggggcttgcggccgcaaccatctccatggctgtttgaatgaggcttcagtactttacagaatcgttgcctgcacatcttggaaacacttgctgggattacttcgacttcttaacccaacagaaggctcgagaaggtatattgctgttgacagtgagcgccagtgtgaagctcttgtcagatagtgaagccacagatgtatctgacaagagcttcacactgatgcctactgcctcggacttcaaggggctagaattcgagcaattatcttgtttactaaaactgaataccttgctatctctttgatacatttttacaaagctgaattaaaatggtataaattaaatcactttgacggtgacttaggagtatgccggatcaacgccctaggtttatgtttggatgaactgacatacgcgtatccgtctaaaaatcaatctcatttcctggtagtgaaatatatattaaaccaggaaatgagattgatttttttacggtaacgcggaattcgcaactattttatcaattttttgcgtcgacgactgtgacagcagagtatgccggatcaacgccctaggtttatgtttggatgaactgacatacgcgtatccgtcttatgtaaaagacaaacaatgcgtagtgaaatatatattaaacgcattgtttgtcttttacatattacggtaacgcggaattcgcaactattttatcaattttttgcgtcgaccggaactatcttgaagagtagtagtggactagtgtgacgctgctgacccctttctttcccttctacagatccaagctgtgaccggcgcctacacctgcagcccaagcttaccatggccttaccagtgaccgccttgctcctgccgctggccttgctgctccacgccgccaggcctgatattcagatgacacagagcccaagttcactgtcagcgagtgtcggagatcgggttactataacctgccgagcatctcaggatatcaataattacctggcctggtatcagcaaaaacccggcaaagtcccgaagctcctgatatacgcagcttcaacactgcaaagcggtgtgccctcgcgctttagcggctctggcagcgggacagatttcaccctgacgatttcctcccttcaacccgaggacgtggccacttactactccctcaactattactctgtaccctggacctttggccaagggacaaaggtggaaatcaagggctctactagcggttcagggaaacctgggagtggagagggctcgaccaagggacaggtccagctcgtggagtctggcggtgggctggttcagccagggaggagtttgcggctttcctgtacgggaagcggattcacctttggtgactatgccatgaactgggtcaggcaggctcctggaaaaggcctagagtgggtgggtttcatcagaaccaagccatatggcggcactacagaatatgcagccagcgtaaaagggagattcacgttcagccgcgacgactctaagtcaatagcttaccttcagatgaactccctcaagaccgaagacaccgccgtgtactattgtactatgatccctgtgctgcgttttttagagtggttgccttggggacaagggacattagttactgtgtcctccgcaaccacgacgccagcgccgcgaccaccaacaccggcgcccaccatcgcgtcgcagcccctgtccctgcgccctgaggcgtgcttcatgtacgtggcggcggccgcctttgtgcttctgttcttcgtgggctgcggggtgctgctgtcccgtaaacgcagacgtcaacacggtcaactgtggtttccagaaggttttaaggtctccgaagcaagtaagaagaaaagacgtgaaccactgggagaagatagcgtcggtctgaaaccactcaagaatgccatggtttctaaactgagccagctgcagacggagctcctggcggccctgctggagtcagggctgagcaaagaggcactgctccaggcactgggcgagccggggccctacctcctggctggagaaggccccctggacaagggggagtcctgcggcggcggtcgaggggagctggctgagctgcccaatgggctgggggagactcggggctccgaggacgagaccgacgacgatggggaagacttcacgccacccatcctcaaagagctggagaacctcagccctgaggaggcggcccaccagaaagccgtggtggagacccttctgcaggaggacccgtggcgtgtggcgaagatggtcaagtcctacctgcagcagcacaacatcccacagcgggaggtggtcgataccactggcctcaaccagtcccacctgtcccaacacctcaacaagggcactcccatgaagacgcagaagcgggccgccctgtacacctggtatgtccgcaagcagcgagaggtggcgcagcagttcacccatgcagggcagggagggctgattgaagagcccacaggagatgagctaccaaccaagaaggggcggaggaaccgtttcaagtggggcccagcatcccagcagatcctgttccaggcctatgagaggcagaagaaccctagcaaggaggagcgagaaacgctagtggaggagtgcaatagggcggaatgcatccagagaggtgtgtcaccatcacaagcacaaggtctgggctccaacctcgtcacggaggtgcgtgtctacaactggtttgccaaccggcgcaaagaagaagccttccggcacaagctggccatgacctgcagggatgagtttcccaccatggtgtttccttctgggcagatcagccaggcctcggccttggccccggcccctccccaagtcctgccccaggctccagcccctgcccctgctccagccatggtatcagctctggcccaggccccagcccctgtcccagtcctagccccaggccctcctcaagctgtggccccacctgcccccaagcccacccaagctggggaaggaacgctgtcagaggccctgctgcagctgcagtttgatgatgaagacctgggggccttgcttggcaacagcacagacccagctgtgttcacagacctggcatccgtcgacaactccgagtttcagcagctgctgaaccagggcatacctgtggccccccacacaactgagcccatgctgatggagtaccctgaggctataactcgcctagtgacaggggcccagaggccccccgacccagctcctgctccactgggggccccggggctccccaatggcctcctttcaggagatgaagacttctcctccattgcggacatggacttctcagccctgctgagtcagatcagctcc

SEQ ID NO: 1239 - DNA, 6655 bp, synthetic construct
  source 1..6655: mol_type = other DNA
cgactgtgccttctagttgccagccatctgttgtttgcccctcccccgtgccttccttgaccctggaaggtgccactcccactgtcctttcctaataaaatgaggaaattgcatcgcattgtctgagtaggtgtcattctattctggggggtggggtggggcaggacagcaagggggaggattgggaagacaatagcaggcatgctggggatgcggtgggctctatgggataagcttgatatcgaattcatcgatgttaataattaacatatatgttaatcattaacatatagttaattattaaccgctatgttaatgattaacaacggttaataattaacatatatgttaatcattaacatataactagtctagagggtatataatgggggccactagtctactaccagagttcatcgctagcgctaccggatccgccaccatggccctgccagtaacggctctgctgctgccacttgctctgctcctccatgcagccaggcctcaggtccagttggtacagagcggcgccgaagtgaaaaagcctggggcgtccgtcaaagtgtcttgcaaggcctccggctatacattcaccgggtactacatgcattgggtgcggcaggcacctggccagggtctagaatggatgggccggatcaatcccaactccggcggcacaaactatgctcagaaatttcaaggtcgcgtcaccatgacccgtgacacaagtacgagcaccgtctacatggagctgtcctccctcaggagcgaggatacagccgtgtactattgtgcaagggagcgcgccggctatagcagcgggcagttcgattattggggacaagggactctggtaactgtgtcctccggaggcggaggatcaggcggaggaggctcaggaggtggaggttctgacattcagatgactcaatctccctcgtcactgtcagctagtgttggggatagagtgactattacctgccgagccagtcagtcaatatctaactggctcgcatggtaccagcagaagccagggaaggctcccaaactgctgatctacgccgcgagcacccttcagaatggcgtgccgtctagatttagcggttctgggtctgggaccgactttacacttactatcagtagtttacaaccagaggactttgctacttattactgtcaacagagctacaccttccctattacgttcggccagggaacaaaagttgaaatcaaggcggcagcaaccacgacgccagcgccgcgaccaccaacaccggcgcccaccatcgcgtcgcagccactgtcactgcgcccagaagcgtgccggccagcggcggggggcgcagtgcatacgagggggctggacttcgcctgtgatatctacatctgggcgcccttggccgggacttgtggggtccttctcctgtcactggttatcaccctttactgcaaacggggcagaaagaaactcctgtatatattcaaacaaccatttatgagaccagtacaaactactcaagaagaggacggctgtagctgccgatttccagaagaagaagaaggaggatgtgaactgagagtgaagttcagcaggagcgcagacgcccccgcgtaccagcagggccagaaccagctctataacgagctcaatctaggacgaagagaggagtacgatgttttggacaagaggcgtggccgggaccctgagatggggggaaagccgagaaggaagaaccctcaggaaggcctgtacaatgaactgcagaaagataagatggcggaggcctacagtgagattgggatgaaaggcgagcgccggaggggcaaggggcacgatggcctttaccagggtctcagtacagccaccaaggacacctacgacgcccttcacatgcaggccctgccccctaggtaaaatcaacctctggattacaaaatttgtgaaagattgactggtattcttaactatgttgctccttttacgctatgtggatacgctgctttaatgcctttgtatcatgctattgcttcccgtatggctttcattttctcctccttgtataaatcctggttgctgtctctttatgaggagttgtggcccgttgtcaggcaacgtggcgtggtctgcactgtgtttgctgacgcaacccccactggttggggcattgccaccacctgtcagctcctttccgggactttcgctttccccctccctattgccacggcggaactcatcgccgcctgccttgcccgctgctggacaggggctcggctgttgggcactgacaattccgtggtgttgtcggggaaatcatcgtcctttccttggctgctcgcctgtgttgccacctggattctgcgcgggacgtccttctgctacgtcccttcggccctcaatccagcggaccttccttcccgcggcctgctgccggctctgcggcctcttccgcgtcttcgccttcgccctcagacgagtcggatctccctttgggccgcctccccgcctggatccttgacttgcggccaacttgtttattgcagcttataatggttacaaataaagcaatagcatcacaaatttcacaaataaagcatttttttcactgcattctagttgtggtttgtccaaactcatcaatgtatcttatcatgtctgggatccttgacttgcggccgcaactcccacctgcaacatgcgtgactgactgaggccgcgactctagagtcgaccggatctgcgatcgctccggtgcccgtcagtgggcagagcgcacatcgcccacagtccccgagaagttggggggaggggtcggcaattgaacgggtgcctagagaaggtggcgcggggtaaactgggaaagtgatgtcgtgtactggctccgcctttttcccgagggtgggggagaaccgtatataagtgcagtagtcgccgtgaacgttctttttcgcaacgggtttgccgccagaacacagctgaagcttcgaggggctcgcatctctccttcacgcgcccgccgccctacctgaggccgccatccacgccggttgagtcgcgttctgccgcctcccgcctgtggtgcctcctgaactgcgtccgccgtctaggtaagtcgactcgttggatccccactacccggatcaacgccctaggtttatgtttggatgaactgacatacgcgtatccgtcttaagaatcttttcaaacactagtagtgaaatatatattaaactagtgtttgaaaagattcttattacggtaacgcggaattcgcaactattttatcaattttttgcgtcgacacttcaaggggcttgcggccgcaaccatctccatggctgtttgaatgaggcttcagtactttacagaatcgttgcctgcacatcttggaaacacttgctgggattacttcgacttcttaacccaacagaaggctcgagaaggtatattgctgttgacagtgagcgccagtgtgaagctcttgtcagatagtgaagccacagatgtatctgacaagagcttcacactgatgcctactgcctcggacttcaaggggctagaattcgagcaattatcttgtttactaaaactgaataccttgctatctctttgatacatttttacaaagctgaattaaaatggtataaattaaatcactttgacggtgacttaggagtatgccggatcaacgccctaggtttatgtttggatgaactgacatacgcgtatccgtctaaaaatcaatctcatttcctggtagtgaaatatatattaaaccaggaaatgagattgatttttttacggtaacgcggaattcgcaactattttatcaattttttgcgtcgacgactgtgacagcagagtatgccggatcaacgccctaggtttatgtttggatgaactgacatacgcgtatccgtcttatgtaaaagacaaacaatgcgtagtgaaatatatattaaacgcattgtttgtcttttacatattacggtaacgcggaattcgcaactattttatcaattttttgcgtcgaccggaactatcttgaagagtagtagtggactagtgtgacgctgctgacccctttctttcccttctacagatccaagctgtgaccggcgcctacacctgcagcccaagcttaccatggccttaccagtgaccgccttgctcctgccgctggccttgctgctccacgccgccaggcctgagatagtcctgacccagtcacccgatttccagagtgttactcctaaggagaaagtgactataacatgccgggcatctcagtctgtcggaagcgggctacattggtaccagcagaagcctgaccagagcccgaaactgctcatcaaatatgcctcccagtcgttttctggcgtgccctctcgcttttccggaagcggatctggcacagacttcaccttgaccatcaatagcctggaaactgaggacgccgctacgtatttctgccagcagtcctccagtctgccttggacatttggtcagggaacgaaggtggagatcaagggttcaacatcagggagcgggaaaccgggctctggcgagggctcaacaaagggacaagtgcaactgcaagaatcgggacccgggctggttaaaccaagtgaaaccctttccctcacttgtaccgtaagcggcggtagcgtgtcctctggtagctactattggagttggattaggcaggcgccagggaaaggcctcgaatggattgggtatatctactacagcggcagtaactactacaacccatcattgaagtctagagtgacaattagtgtcgatacctctaaaaatcaattctcacttaagctgcgagctgtaaccgccgcagacactgcggtgtactattgtgcccgttggatgaccactatcaagggctacttcgattattggggacaagggacattagttacggtgtcctccgcaaccacgacgccagcgccgcgaccaccaacaccggcgcccaccatcgcgtcgcagcccctgtccctgcgccctgaggcgtgcttcatgtacgtggcggcggccgcctttgtgcttctgttcttcgtgggctgcggggtgctgctgtcccgtaaacgcagacgtcaacacggtcaactgtggtttccagaaggttttaaggtctccgaagcaagtaagaagaaaagacgtgaaccactgggagaagatagcgtcggtctgaaaccactcaagaatgccatggtttctaaactgagccagctgcagacggagctcctggcggccctgctggagtcagggctgagcaaagaggcactgctccaggcactgggcgagccggggccctacctcctggctggagaaggccccctggacaagggggagtcctgcggcggcggtcgaggggagctggctgagctgcccaatgggctgggggagactcggggctccgaggacgagaccgacgacgatggggaagacttcacgccacccatcctcaaagagctggagaacctcagccctgaggaggcggcccaccagaaagccgtggtggagacccttctgcaggaggacccgtggcgtgtggcgaagatggtcaagtcctacctgcagcagcacaacatcccacagcgggaggtggtcgataccactggcctcaaccagtcccacctgtcccaacacctcaacaagggcactcccatgaagacgcagaagcgggccgccctgtacacctggtatgtccgcaagcagcgagaggtggcgcagcagttcacccatgcagggcagggagggctgattgaagagcccacaggagatgagctaccaaccaagaaggggcggaggaaccgtttcaagtggggcccagcatcccagcagatcctgttccaggcctatgagaggcagaagaaccctagcaaggaggagcgagaaacgctagtggaggagtgcaatagggcggaatgcatccagagaggtgtgtcaccatcacaagcacaaggtctgggctccaacctcgtcacggaggtgcgtgtctacaactggtttgccaaccggcgcaaagaagaagccttccggcacaagctggccatgacctgcagggatgagtttcccaccatggtgtttccttctgggcagatcagccaggcctcggccttggccccggcccctccccaagtcctgccccaggctccagcccctgcccctgctccagccatggtatcagctctggcccaggccccagcccctgtcccagtcctagccccaggccctcctcaagctgtggccccacctgcccccaagcccacccaagctggggaaggaacgctgtcagaggccctgctgcagctgcagtttgatgatgaagacctgggggccttgcttggcaacagcacagacccagctgtgttcacagacctggcatccgtcgacaactccgagtttcagcagctgctgaaccagggcatacctgtggccccccacacaactgagcccatgctgatggagtaccctgaggctataactcgcctagtgacaggggcccagaggccccccgacccagctcctgctccactgggggccccggggctccccaatggcctcctttcaggagatgaagacttctcctccattgcggacatggacttctcagccctgctgagtcagatcagctcc

SEQ ID NO: 1240 - DNA, 6655 bp, synthetic construct
  source 1..6655: mol_type = other DNA
cgactgtgccttctagttgccagccatctgttgtttgcccctcccccgtgccttccttgaccctggaaggtgccactcccactgtcctttcctaataaaatgaggaaattgcatcgcattgtctgagtaggtgtcattctattctggggggtggggtggggcaggacagcaagggggaggattgggaagacaatagcaggcatgctggggatgcggtgggctctatgggataagcttgatatcgaattcatcgatgttaataattaacatatatgttaatcattaacatatagttaattattaaccgctatgttaatgattaacaacggttaataattaacatatatgttaatcattaacatataactagtctagagggtatataatgggggccactagtctactaccagagttcatcgctagcgctaccggatccgccaccatggccctgccagtaacggctctgctgctgccacttgctctgctcctccatgcagccaggcctcaggtccagttggtacagagcggcgccgaagtgaaaaagcctggggcgtccgtcaaagtgtcttgcaaggcctccggctatacattcaccgggtactacatgcattgggtgcggcaggcacctggccagggtctagaatggatgggccggatcaatcccaactccggcggcacaaactatgctcagaaatttcaaggtcgcgtcaccatgacccgtgacacaagtacgagcaccgtctacatggagctgtcctccctcaggagcgaggatacagccgtgtactattgtgcaagggagcgcgccggctatagcagcgggcagttcgattattggggacaagggactctggtaactgtgtcctccggaggcggaggatcaggcggaggaggctcaggaggtggaggttctgacattcagatgactcaatctccctcgtcactgtcagctagtgttggggatagagtgactattacctgccgagccagtcagtcaatatctaactggctcgcatggtaccagcagaagccagggaaggctcccaaactgctgatctacgccgcgagcacccttcagaatggcgtgccgtctagatttagcggttctgggtctgggaccgactttacacttactatcagtagtttacaaccagaggactttgctacttattactgtcaacagagctacaccttccctattacgttcggccagggaacaaaagttgaaatcaaggcggcagcaaccacgacgccagcgccgcgaccaccaacaccggcgcccaccatcgcgtcgcagccactgtcactgcgcccagaagcgtgccggccagcggcggggggcgcagtgcatacgagggggctggacttcgcctgtgatatctacatctgggcgcccttggccgggacttgtggggtccttctcctgtcactggttatcaccctttactgcaaacggggcagaaagaaactcctgtatatattcaaacaaccatttatgagaccagtacaaactactcaagaagaggacggctgtagctgccgatttccagaagaagaagaaggaggatgtgaactgagagtgaagttcagcaggagcgcagacgcccccgcgtaccagcagggccagaaccagctctataacgagctcaatctaggacgaagagaggagtacgatgttttggacaagaggcgtggccgggaccctgagatggggggaaagccgagaaggaagaaccctcaggaaggcctgtacaatgaactgcagaaagataagatggcggaggcctacagtgagattgggatgaaaggcgagcgccggaggggcaaggggcacgatggcctttaccagggtctcagtacagccaccaaggacacctacgacgcccttcacatgcaggccctgccccctaggtaaaatcaacctctggattacaaaatttgtgaaagattgactggtattcttaactatgttgctccttttacgctatgtggatacgctgctttaatgcctttgtatcatgctattgcttcccgtatggctttcattttctcctccttgtataaatcctggttgctgtctctttatgaggagttgtggcccgttgtcaggcaacgtggcgtggtctgcactgtgtttgctgacgcaacccccactggttggggcattgccaccacctgtcagctcctttccgggactttcgctttccccctccctattgccacggcggaactcatcgccgcctgccttgcccgctgctggacaggggctcggctgttgggcactgacaattccgtggtgttgtcggggaaatcatcgtcctttccttggctgctcgcctgtgttgccacctggattctgcgcgggacgtccttctgctacgtcccttcggccctcaatccagcggaccttccttcccgcggcctgctgccggctctgcggcctcttccgcgtcttcgccttcgccctcagacgagtcggatctccctttgggccgcctccccgcctggatccttgacttgcggccaacttgtttattgcagcttataatggttacaaataaagcaatagcatcacaaatttcacaaataaagcatttttttcactgcattctagttgtggtttgtccaaactcatcaatgtatcttatcatgtctgggatccttgacttgcggccgcaactcccacctgcaacatgcgtgactgactgaggccgcgactctagagtcgaccggatctgcgatcgctccggtgcccgtcagtgggcagagcgcacatcgcccacagtccccgagaagttggggggaggggtcggcaattgaacgggtgcctagagaaggtggcgcggggtaaactgggaaagtgatgtcgtgtactggctccgcctttttcccgagggtgggggagaaccgtatataagtgcagtagtcgccgtgaacgttctttttcgcaacgggtttgccgccagaacacagctgaagcttcgaggggctcgcatctctccttcacgcgcccgccgccctacctgaggccgccatccacgccggttgagtcgcgttctgccgcctcccgcctgtggtgcctcctgaactgcgtccgccgtctaggtaagtcgactcgttggatccccactacccggatcaacgccctaggtttatgtttggatgaactgacatacgcgtatccgtcttaagaatcttttcaaacactagtagtgaaatatatattaaactagtgtttgaaaagattcttattacggtaacgcggaattcgcaactattttatcaattttttgcgtcgacacttcaaggggcttgcggccgcaaccatctccatggctgtttgaatgaggcttcagtactttacagaatcgttgcctgcacatcttggaaacacttgctgggattacttcgacttcttaacccaacagaaggctcgagaaggtatattgctgttgacagtgagcgccagtgtgaagctcttgtcagatagtgaagccacagatgtatctgacaagagcttcacactgatgcctactgcctcggacttcaaggggctagaattcgagcaattatcttgtttactaaaactgaataccttgctatctctttgatacatttttacaaagctgaattaaaatggtataaattaaatcactttgacggtgacttaggagtatgccggatcaacgccctaggtttatgtttggatgaactgacatacgcgtatccgtctaaaaatcaatctcatttcctggtagtgaaatatatattaaaccaggaaatgagattgatttttttacggtaacgcggaattcgcaactattttatcaattttttgcgtcgacgactgtgacagcagagtatgccggatcaacgccctaggtttatgtttggatgaactgacatacgcgtatccgtcttatgtaaaagacaaacaatgcgtagtgaaatatatattaaacgcattgtttgtcttttacatattacggtaacgcggaattcgcaactattttatcaattttttgcgtcgaccggaactatcttgaagagtagtagtggactagtgtgacgctgctgacccctttctttcccttctacagatccaagctgtgaccggcgcctacacctgcagcccaagcttaccatggccttaccagtgaccgccttgctcctgccgctggccttgctgctccacgccgccaggcctgaaatcgtcctgacacagtctccagattttcagagcgtgacgccaaaggagaaagtgacaattacatgccgggcatctcagtctgttgggtctgggttgcattggtatcagcaaaagcccgaccagtcacccaaactgctcatcaaatatgcaagccagagtttttcaggcgtaccttcacgatttagcggaagtggttctggcactgacttcaccttgacgattaatagcctggaagtagaagacgctgccactttctactgcctgcaaagtagctccctgccctggacttttgggcagggtactaaggtcgagatcaagggctcgacaagcggaagtggcaaaccgggcagcggcgagggaagcaccaagggacaagtgcaactgcaagagtctggacccgggctggtgaaaccaagcgagacattatccctcacttgtaccgtgtcaggcggtagtgtgtcctccgggaatttctactggagttggatacgccagcctcctgggaagggccttgaatggattggctacatctactattcaggctccacctactacaacccgtctttgaagtcaagggttacgataagcgtcgatacctccaaaaaccaattctccctaaagctcagatcgttaactgccgctgataccgcggtgtactattgtgcccgttggatgaccaaagttaagggttatttcgactattggggacaagggacacttgtcaccgtgtcctccgcaaccacgacgccagcgccgcgaccaccaacaccggcgcccaccatcgcgtcgcagcccctgtccctgcgccctgaggcgtgcttcatgtacgtggcggcggccgcctttgtgcttctgttcttcgtgggctgcggggtgctgctgtcccgtaaacgcagacgtcaacacggtcaactgtggtttccagaaggttttaaggtctccgaagcaagtaagaagaaaagacgtgaaccactgggagaagatagcgtcggtctgaaaccactcaagaatgccatggtttctaaactgagccagctgcagacggagctcctggcggccctgctggagtcagggctgagcaaagaggcactgctccaggcactgggcgagccggggccctacctcctggctggagaaggccccctggacaagggggagtcctgcggcggcggtcgaggggagctggctgagctgcccaatgggctgggggagactcggggctccgaggacgagaccgacgacgatggggaagacttcacgccacccatcctcaaagagctggagaacctcagccctgaggaggcggcccaccagaaagccgtggtggagacccttctgcaggaggacccgtggcgtgtggcgaagatggtcaagtcctacctgcagcagcacaacatcccacagcgggaggtggtcgataccactggcctcaaccagtcccacctgtcccaacacctcaacaagggcactcccatgaagacgcagaagcgggccgccctgtacacctggtatgtccgcaagcagcgagaggtggcgcagcagttcacccatgcagggcagggagggctgattgaagagcccacaggagatgagctaccaaccaagaaggggcggaggaaccgtttcaagtggggcccagcatcccagcagatcctgttccaggcctatgagaggcagaagaaccctagcaaggaggagcgagaaacgctagtggaggagtgcaatagggcggaatgcatccagagaggtgtgtcaccatcacaagcacaaggtctgggctccaacctcgtcacggaggtgcgtgtctacaactggtttgccaaccggcgcaaagaagaagccttccggcacaagctggccatgacctgcagggatgagtttcccaccatggtgtttccttctgggcagatcagccaggcctcggccttggccccggcccctccccaagtcctgccccaggctccagcccctgcccctgctccagccatggtatcagctctggcccaggccccagcccctgtcccagtcctagccccaggccctcctcaagctgtggccccacctgcccccaagcccacccaagctggggaaggaacgctgtcagaggccctgctgcagctgcagtttgatgatgaagacctgggggccttgcttggcaacagcacagacccagctgtgttcacagacctggcatccgtcgacaactccgagtttcagcagctgctgaaccagggcatacctgtggccccccacacaactgagcccatgctgatggagtaccctgaggctataactcgcctagtgacaggggcccagaggccccccgacccagctcctgctccactgggggccccggggctccccaatggcctcctttcaggagatgaagacttctcctccattgcggacatggacttctcagccctgctgagtcagatcagctcc

SEQ ID NO: 1241 - DNA, 6670 bp, synthetic construct
  source 1..6670: mol_type = other DNA
cgactgtgccttctagttgccagccatctgttgtttgcccctcccccgtgccttccttgaccctggaaggtgccactcccactgtcctttcctaataaaatgaggaaattgcatcgcattgtctgagtaggtgtcattctattctggggggtggggtggggcaggacagcaagggggaggattgggaagacaatagcaggcatgctggggatgcggtgggctctatgggataagcttgatatcgaattcatcgatgttaataattaacatatatgttaatcattaacatatagttaattattaaccgctatgttaatgattaacaacggttaataattaacatatatgttaatcattaacatataactagtctagagggtatataatgggggccactagtctactaccagagttcatcgctagcgctaccggatccgccaccatggccctgccagtaacggctctgctgctgccacttgctctgctcctccatgcagccaggcctcaagtgcagctggtccagtctggggcggaagtgaaaaagcccggagctagtgtaaaggtgtcctgtaaagccagcggctacaccttcaccggttattacctgcattgggtccggcaggctcctggccagggcctggagtggatgggctggatttccgcatataacggaaacacaaattacgcccagaacctgcaaggccgcgtgaccatgaccagggacacaagcactagcactgtctacatggagttgtctagcttgagaagcgaagataccgctgtgtactattgcgcccgacactcttactcgggctcatactcaacgctaccctattatgggatggatgtttggggtcaagggacaacggtcacagtatcctctggaggcggtggcagcggaggaggcgggtctggaggtggtggatcagacattcagatgacccagtcaccaagttccttatccgcaagcgttggggatcgtgttacaattacttgcagggcctcgcaagggatctctaattatctcgcttggtaccagcagaaacctgggaaagcacccaagctgctgatctacactgcaagcacactttttccaggagtgccgtcaagattctctgggtccgggagtggcactgacttcacccttaccatctcctccctccagcctgaggactttgccacatattattgtcaacagagttactccataccactcacgtttggcggcggaacaaaagttgaaatcaaggcggcagcaaccacgacgccagcgccgcgaccaccaacaccggcgcccaccatcgcgtcgcagccactgtcactgcgcccagaagcgtgccggccagcggcggggggcgcagtgcatacgagggggctggacttcgcctgtgatatctacatctgggcgcccttggccgggacttgtggggtccttctcctgtcactggttatcaccctttactgcaaacggggcagaaagaaactcctgtatatattcaaacaaccatttatgagaccagtacaaactactcaagaagaggacggctgtagctgccgatttccagaagaagaagaaggaggatgtgaactgagagtgaagttcagcaggagcgcagacgcccccgcgtaccagcagggccagaaccagctctataacgagctcaatctaggacgaagagaggagtacgatgttttggacaagaggcgtggccgggaccctgagatggggggaaagccgagaaggaagaaccctcaggaaggcctgtacaatgaactgcagaaagataagatggcggaggcctacagtgagattgggatgaaaggcgagcgccggaggggcaaggggcacgatggcctttaccagggtctcagtacagccaccaaggacacctacgacgcccttcacatgcaggccctgccccctaggtaaaatcaacctctggattacaaaatttgtgaaagattgactggtattcttaactatgttgctccttttacgctatgtggatacgctgctttaatgcctttgtatcatgctattgcttcccgtatggctttcattttctcctccttgtataaatcctggttgctgtctctttatgaggagttgtggcccgttgtcaggcaacgtggcgtggtctgcactgtgtttgctgacgcaacccccactggttggggcattgccaccacctgtcagctcctttccgggactttcgctttccccctccctattgccacggcggaactcatcgccgcctgccttgcccgctgctggacaggggctcggctgttgggcactgacaattccgtggtgttgtcggggaaatcatcgtcctttccttggctgctcgcctgtgttgccacctggattctgcgcgggacgtccttctgctacgtcccttcggccctcaatccagcggaccttccttcccgcggcctgctgccggctctgcggcctcttccgcgtcttcgccttcgccctcagacgagtcggatctccctttgggccgcctccccgcctggatccttgacttgcggccaacttgtttattgcagcttataatggttacaaataaagcaatagcatcacaaatttcacaaataaagcatttttttcactgcattctagttgtggtttgtccaaactcatcaatgtatcttatcatgtctgggatccttgacttgcggccgcaactcccacctgcaacatgcgtgactgactgaggccgcgactctagagtcgaccggatctgcgatcgctccggtgcccgtcagtgggcagagcgcacatcgcccacagtccccgagaagttggggggaggggtcggcaattgaacgggtgcctagagaaggtggcgcggggtaaactgggaaagtgatgtcgtgtactggctccgcctttttcccgagggtgggggagaaccgtatataagtgcagtagtcgccgtgaacgttctttttcgcaacgggtttgccgccagaacacagctgaagcttcgaggggctcgcatctctccttcacgcgcccgccgccctacctgaggccgccatccacgccggttgagtcgcgttctgccgcctcccgcctgtggtgcctcctgaactgcgtccgccgtctaggtaagtcgactcgttggatccccactacccggatcaacgccctaggtttatgtttggatgaactgacatacgcgtatccgtcttaagaatcttttcaaacactagtagtgaaatatatattaaactagtgtttgaaaagattcttattacggtaacgcggaattcgcaactattttatcaattttttgcgtcgacacttcaaggggcttgcggccgcaaccatctccatggctgtttgaatgaggcttcagtactttacagaatcgttgcctgcacatcttggaaacacttgctgggattacttcgacttcttaacccaacagaaggctcgagaaggtatattgctgttgacagtgagcgccagtgtgaagctcttgtcagatagtgaagccacagatgtatctgacaagagcttcacactgatgcctactgcctcggacttcaaggggctagaattcgagcaattatcttgtttactaaaactgaataccttgctatctctttgatacatttttacaaagctgaattaaaatggtataaattaaatcactttgacggtgacttaggagtatgccggatcaacgccctaggtttatgtttggatgaactgacatacgcgtatccgtctaaaaatcaatctcatttcctggtagtgaaatatatattaaaccaggaaatgagattgatttttttacggtaacgcggaattcgcaactattttatcaattttttgcgtcgacgactgtgacagcagagtatgccggatcaacgccctaggtttatgtttggatgaactgacatacgcgtatccgtcttatgtaaaagacaaacaatgcgtagtgaaatatatattaaacgcattgtttgtcttttacatattacggtaacgcggaattcgcaactattttatcaattttttgcgtcgaccggaactatcttgaagagtagtagtggactagtgtgacgctgctgacccctttctttcccttctacagatccaagctgtgaccggcgcctacacctgcagcccaagcttaccatggccttaccagtgaccgccttgctcctgccgctggccttgctgctccacgccgccaggcctgagatagtcctgacccagtcacccgatttccagagtgttactcctaaggagaaagtgactataacatgccgggcatctcagtctgtcggaagcgggctacattggtaccagcagaagcctgaccagagcccgaaactgctcatcaaatatgcctcccagtcgttttctggcgtgccctctcgcttttccggaagcggatctggcacagacttcaccttgaccatcaatagcctggaaactgaggacgccgctacgtatttctgccagcagtcctccagtctgccttggacatttggtcagggaacgaaggtggagatcaagggttcaacatcagggagcgggaaaccgggctctggcgagggctcaacaaagggacaagtgcaactgcaagaatcgggacccgggctggttaaaccaagtgaaaccctttccctcacttgtaccgtaagcggcggtagcgtgtcctctggtagctactattggagttggattaggcaggcgccagggaaaggcctcgaatggattgggtatatctactacagcggcagtaactactacaacccatcattgaagtctagagtgacaattagtgtcgatacctctaaaaatcaattctcacttaagctgcgagctgtaaccgccgcagacactgcggtgtactattgtgcccgttggatgaccactatcaagggctacttcgattattggggacaagggacattagttacggtgtcctccgcaaccacgacgccagcgccgcgaccaccaacaccggcgcccaccatcgcgtcgcagcccctgtccctgcgccctgaggcgtgcttcatgtacgtggcggcggccgcctttgtgcttctgttcttcgtgggctgcggggtgctgctgtcccgtaaacgcagacgtcaacacggtcaactgtggtttccagaaggttttaaggtctccgaagcaagtaagaagaaaagacgtgaaccactgggagaagatagcgtcggtctgaaaccactcaagaatgccatggtttctaaactgagccagctgcagacggagctcctggcggccctgctggagtcagggctgagcaaagaggcactgctccaggcactgggcgagccggggccctacctcctggctggagaaggccccctggacaagggggagtcctgcggcggcggtcgaggggagctggctgagctgcccaatgggctgggggagactcggggctccgaggacgagaccgacgacgatggggaagacttcacgccacccatcctcaaagagctggagaacctcagccctgaggaggcggcccaccagaaagccgtggtggagacccttctgcaggaggacccgtggcgtgtggcgaagatggtcaagtcctacctgcagcagcacaacatcccacagcgggaggtggtcgataccactggcctcaaccagtcccacctgtcccaacacctcaacaagggcactcccatgaagacgcagaagcgggccgccctgtacacctggtatgtccgcaagcagcgagaggtggcgcagcagttcacccatgcagggcagggagggctgattgaagagcccacaggagatgagctaccaaccaagaaggggcggaggaaccgtttcaagtggggcccagcatcccagcagatcctgttccaggcctatgagaggcagaagaaccctagcaaggaggagcgagaaacgctagtggaggagtgcaatagggcggaatgcatccagagaggtgtgtcaccatcacaagcacaaggtctgggctccaacctcgtcacggaggtgcgtgtctacaactggtttgccaaccggcgcaaagaagaagccttccggcacaagctggccatgacctgcagggatgagtttcccaccatggtgtttccttctgggcagatcagccaggcctcggccttggccccggcccctccccaagtcctgccccaggctccagcccctgcccctgctccagccatggtatcagctctggcccaggccccagcccctgtcccagtcctagccccaggccctcctcaagctgtggccccacctgcccccaagcccacccaagctggggaaggaacgctgtcagaggccctgctgcagctgcagtttgatgatgaagacctgggggccttgcttggcaacagcacagacccagctgtgttcacagacctggcatccgtcgacaactccgagtttcagcagctgctgaaccagggcatacctgtggccccccacacaactgagcccatgctgatggagtaccctgaggctataactcgcctagtgacaggggcccagaggccccccgacccagctcctgctccactgggggccccggggctccccaatggcctcctttcaggagatgaagacttctcctccattgcggacatggacttctcagccctgctgagtcagatcagctcc

SEQ ID NO: 1242 - DNA, 6655 bp, synthetic construct; identical to SEQ ID NO: 1239
  source 1..6655: mol_type = other DNA

SEQ ID NO: 1243 - DNA, 592 bp, synthetic construct
  source 1..592: mol_type = other DNA
aatcaacctctggattacaaaatttgtgaaagattgactggtattcttaactatgttgctccttttacgctatgtggatacgctgctttaatgcctttgtatcatgctattgcttcccgtatggctttcattttctcctccttgtataaatcctggttgctgtctctttatgaggagttgtggcccgttgtcaggcaacgtggcgtggtctgcactgtgtttgctgacgcaacccccactggttggggcattgccaccacctgtcagctcctttccgggactttcgctttccccctccctattgccacggcggaactcatcgccgcctgccttgcccgctgctggacaggggctcggctgttgggcactgacaattccgtggtgttgtcggggaaatcatcgtcctttccttggctgctcgcctgtgttgccacctggattctgcgcgggacgtccttctgctacgtcccttcggccctcaatccagcggaccttccttcccgcggcctgctgccggctctgcggcctcttccgcgtcttcgccttcgccctcagacgagtcggatctccctttgggccgcctccccgcctg

SEQ ID NO: 1244 - RNA, 132 nt, Simian virus 40
  source 1..132: mol_type = unassigned RNA
aacttgtttattgcagcttataatggttacaaataaagcaatagcatcacaaatttcacaaataaagcatttttttcactgcattctagttgtggtttgtccaaactcatcaatgtatcttatcatgtctgg

SEQ ID NO: 1245 - DNA, 110 bp, synthetic construct
  source 1..110: mol_type = other DNA
gttaataattaacatatatgttaatcattaacatatagttaattattaaccgctatgttaatgattaacaacggttaataattaacatatatgttaatcattaacatata

SEQ ID NO: 1246 - DNA, 25 bp, synthetic construct
  source 1..25: mol_type = other DNA
tctagagggtatataatgggggcca

SEQ ID NO: 1247 - protein, 329 aa, synthetic construct
ASTKGPSVFPLAPSSKSTSGGTAALGCLVKDYFPEPVTVSWNSGALTSGVHTFPAVLQSSGLYSLSSVVTVPSSSLGTQTYICNVNHKPSNTKVDKRVEPKSCDKTHTCPPCPAPELLGGPSVFLFPPKPKDTLMISRTPEVTCVVVDVSHEDPEVKFNWYVDGVEVHNAKTKPREEQYNSTYRVVSVLTVLHQDWLNGKEYKCKVSNKALPAPIEKTISKAKGQPREPQVYTLPPSREEMTKNQVSLTCLVKGFYPSDIAVEWESNGQPENNYKTTPPVLDSDGSFFLYSKLTVDKSRWQQGNVFSCSVMHEALHNHYTQKSLSLSPG

SEQ ID NO: 1248 - protein, 107 aa, synthetic construct [sequence omitted]

SEQ ID NO: 1249 - protein, 366 aa, synthetic construct
VEVATHYLEIITQLIVESFHFKNGEDAPDLLKVITKPFTKLIVQLDKKVISQIAMNDEKAKNKSLVKIWCKTFTNKTQINVTVPSTANCTSPSLCWTDGIQNWTMKNVTYKENIAKCQHIFVNFHLPDLGSAAAEPRSPTIKPCPPCKCPAPNLEGGPSVFIFPPKIKDVLMISLSPIVTCVVVDVSEDDPDVQISWFVNNVEVHTAQTQTHREDYNSTLRVVSALPIQHQDWMSGKAFACAVNNKDLPAPIERTISKPKGSVRAPQVYVLPPPEEEMTKKQVTLTCMVTDFMPEDIYVEWTNNGKTELNYKNTEPVLDSDGSYFMYSKLRVEKKNWVERNSYSCSVVHEGLHNHHTTKSFSRTPG

SEQ ID NO: 1250 - protein, 107 aa, synthetic construct
DIQMTQSPSSLSASVGDRVTITCRASQTISSYLNWYQQKPGKAPKLLISPASNLQSGVPSRFSGSGSGTDFTLTISSLQPEDFATYYCQQSYIIPWTFGQGTKVEIK

SEQ ID NO: 1251 - protein, 11 aa, synthetic construct
RASQTISSYLN

SEQ ID NO: 1252 - DNA, 995 bp, synthetic construct
  source 1..995: mol_type = other DNA
gtaagtcgactcgttggatccccactacccggatcaacgccctaggtttatgtttggatgaactgacatacgcgtatccgtcttaagaatcttttcaaacactagtagtgaaatatatattaaactagtgtttgaaaagattcttattacggtaacgcggaattcgcaactattttatcaattttttgcgtcgacacttcaaggggcttgcggccgcaaccatctccatggctgtttgaatgaggcttcagtactttacagaatcgttgcctgcacatcttggaaacacttgctgggattacttcgacttcttaacccaacagaaggctcgagaaggtatattgctgttgacagtgagcgccagtgtgaagctcttgtcagatagtgaagccacagatgtatctgacaagagcttcacactgatgcctactgcctcggacttcaaggggctagaattcgagcaattatcttgtttactaaaactgaataccttgctatctctttgatacatttttacaaagctgaattaaaatggtataaattaaatcactttgacggtgacttaggagtatgccggatcaacgccctaggtttatgtttggatgaactgacatacgcgtatccgtctaaaaatcaatctcatttcctggtagtgaaatatatattaaaccaggaaatgagattgatttttttacggtaacgcggaattcgcaactattttatcaattttttgcgtcgacgactgtgacagcagagtatgccggatcaacgccctaggtttatgtttggatgaactgacatacgcgtatccgtcttatgtaaaagacaaacaatgcgtagtgaaatatatattaaacgcattgtttgtcttttacatattacggtaacgcggaattcgcaactattttatcaattttttgcgtcgaccggaactatcttgaagagtagtagtggactagtgtgacgctgctgacccctttctttcccttctacag
